United States Patent Application Publication US 2009/0077685 A1 - sequence listing, part 4

SEQ ID NO: 20335 - DNA, 238 bp, Glycine max
  Clone ID: 700872108H1
tggagagagaaagagtgtgtttgtgttgacgagagagcttcacaaataaactcacaaaaccatatgatttttcttcttctgggtctttgagaccatgaagtagtagttgtagtagattatacccttttgagtttttttttcttctcttttttttttctccaaaatccttatttcccccgaaatctagactagctaagatctcttgtggggtatttgagatttctttttttttccaggt

SEQ ID NO: 20336 - DNA, 240 bp, Glycine max
  Clone ID: 700872109H1
agccaagtgaaattgagaaaaaataaaaatcaaagagcataatgtcagggatcattcacaagattggggagacccttcatgtgggagggcacaagaaggaggaggagcataagggtgagcactctgctggagaatacaaagggagcaccatggtgaacacagtagtgagtacaaaggagagcatcatggtgaacacaaagctggagagtaccatggtgagcacacgccagagcacaaaga

SEQ ID NO: 20337 - DNA, 242 bp, Glycine max
  Clone ID: 700872110H1
cggctcgagcggctcgaggcaaatccagaaacttcagcaaattctcctaggtgctcccaaggaggttttacacatagacaaattggttcccctccatgcgttgcagctattgcagctgctactgtagcagctgcaactgctggtgggcagctcatggatagcttcctttgtgtgctcctcttcatacttcttttgcctgtcctgcatcagtgactacagttccatcaatgaataccggtgaa

SEQ ID NO: 20338 - DNA, 245 bp, Glycine max
  Clone ID: 700872111H1
cgctcgagccgaatcggctcgagctaaagttgcagacaatgggatgacagcctgattcaatacactctcaatgctatgatcaaagccttttctgagtctggcaaggtagatgaggccatgaaaatctttcagaaaatgaaggagatggatgtaaaccaacgactagtacttataatactctcatcaaaggatttgggattgctggaaggccttatgaatctatgaaattgctagagatgatgggt

SEQ ID NO: 20339 - DNA, 244 bp, Glycine max
  Clone ID: 700872112H1
gtctttagaggacccaatggtgctgctgctggggttggtgctcagcattctcaatgttatgcatctttgtatggttcatgccctgggttgaaagtcttgtcaccatattcatctgaagatgcccgtggtttgcttaaagctgtattagggaccctgatcctgttgttttccttgaaaatgaattgttatatggtgagtcattccctgtttcggccgaagttcttgattccagtttttgccttcc

SEQ ID NO: 20340 - DNA, 196 bp, Glycine max
  Clone ID: 700872115H1
gaggctgttgatcaccaacaagctggtggctggcctgctattgttgctggaaacctcactgaaacagttgatgtgggtgaggccaaggcagctagctctatttcgatgcagaaagttgaagtacctgcaggacgagcttggaaaccggctcctggtttcaaaccaaaatctttcttagaaattcaacaggaagaac

SEQ ID NO: 20341 - DNA, 271 bp, Glycine max
  Clone ID: 700872067H1
ggtattcggctcgagctcgagccgaatcggctcgagatgagatgttgattttgcaggtgactttgactcccacacaattagcaatagtgatggagtatgcagcagggggagagctctttgacaggatatgcagtgctggcaggttcagtgaagatgaggctagatatttctttcagcagctgatctccggtgtccatttctgtcataccatgcaaatatgccacagagatttgaagctagaaaatacccttctagatggaagtcctgctcc

SEQ ID NO: 20342 - DNA, 266 bp, Glycine max
  Clone ID: 700872017H1
ttgccgaacaggcgaagtctttccggccccatgatgatgatgatgatgattcagatgatgactttagtgatgatgaagagttgcagtccccaattgacgatgttgatccttttgttttctttgtggatacaatcaaagtgatacaatcatcggatccatcgaggtttgtgaaccttacccaaacgcttgagtttaattatcaagctctcgctaatggtgttgcccagcatgctgagcagagaagggcagaaattgaaaaggagaaa

SEQ ID NO: 20343 - DNA, 262 bp, Glycine max
  Clone ID: 700872018H1
ctcgagccacttctatatttctggtatgctgaggtggagcttgcaaataactctgctaatgatcgtgaatcttcatctcgtggaatacatatattatcatgcttaggaagtggtacaaagtacaacccatttaaaagtcaagcatcaagtttgctactgcttagagcacatcaaggatttaaagaaaaactgagaacagtgtggtcatcttgggttcgtggtataataaatgaccagtctgtagctctaatatgttctgctg

SEQ ID NO: 20344 - DNA, 263 bp, Glycine max
  Clone ID: 700872020H1
tctcgagccgaatcggctcgaggcctttttttgttactcgattcagggaggcactgtttcactactcttcactctttgacatgcttgaagccattgtttctcgcgaggaatgggagaggatgctcattgagaaagaaatatttggtagggaagcattgaatgtcatagcatgtgaaggctgtgagagagtagagaggccagagacatatgaggcagtggcaagcccgaattctaagggctggatttttgcaacaaccttttga

SEQ ID NO: 20345 - DNA, 277 bp, Glycine max
  Clone ID: 700872021H1
gctcggagatcggctcgagtttctctctcgtttttgctcaaaaagttgcaagagttaaagctagaaccaaagtgagagagagaatgatgaagccatcgatgctcagatctcttcactctgccgccacccgcggcgcctcccacctctcccgccgtggctacgcctccgagccggtgccggagcgcaaggtggccgttctaggtgccgccggcgggatcgggcaacccctctcccttctcatgaagctcaaccccctcgtttccagcctctccctcta

SEQ ID NO: 20346 - DNA, 261 bp, Glycine max
  Clone ID: 700872023H1
cttcctcaaacccttttgcatacttgttcatagacttaaccactcttctgccattgagggtctcatacccccagttacttgttttgtctcttacggttgcatgccttttactatactagctgctcaagagcttggactccctaactttatcttttggcctgctagtgcctgttctttcttgtgtatcatcaactttcccactctggttgagaaaggtcttacaccactcaaagatgagagttatctgacaaatgggtattt

SEQ ID NO: 20347 - DNA, 259 bp, Glycine max
  Clone ID: 700872025H1
gatagtatacgttttaccgggagcatgaagtttgaggtttatgataaggagaattgcattctctctggggttctggagacgtctaatagcaatggttttgttggggaatcaagaagtggtgtgaagagatggagtatgaattgtcaaacagaaatgtcacctggttgtggcttcttcaagggaaaacatgttgctgtccctgaattgccttgtcctgaaattgaggtttatgttgctggttgcttctcaggaacaccta

SEQ ID NO: 20348 - DNA, 259 bp, Glycine max
  Clone ID: 700872026H1
gtttagtcacttgacgaggttccatcctcaaatttggacaacaacatagatgttgacaacaccgaaagaagtgattatgaaagcacatcacagcttactgtgccacagatactttcagctgaggtggctagtcatggggaaaaaacttcaaaaacggagcttttcctaatttctggtgctgcatgcttgcctcatccctctaaggtcgagaggatgcttatttcatttctcaccaaaactggctagctgtggctgatgg

SEQ ID NO: 20349 - DNA, 255 bp, Glycine max
  Clone ID: 700872028H1
gcgcaaagagttaaacaatctttacaacgttacaaagaactccacgccaaggatagctataatgtcttgcagttctttgtaacgttgtaaagaacttcaagacattatagctatccttggcttggacgaattatccgaagaagatcgcttaaccgtagcaagagcacgaacaattgagcgtttcttatcacaaccttttttcgtagcagaagtttttaccagttcgccggggaaattgttagtctagcagaaaca

SEQ ID NO: 20350 - DNA, 256 bp, Glycine max
  Clone ID: 700872029H1
ctttggtggccacagcaacaataacaatggcagtctcactacaagctgcagctaccttcatgcaacccaccaaggtgggcatggccactcgcaacctcaaatctacacaatgcatttcttaggcttttggcttggaacccgctgcagctaaactcatttgctcccttaagcccgatctcaaagattttgctcaaaaatgtgtcgacgccaccataattgcaggatttgcccttgccacctcagctctcgttgtttc

SEQ ID NO: 20351 - DNA, 256 bp, Glycine max
  Clone ID: 700872030H1
gttaaaataaaaataaaaagtcatcaaactaagcttctaacttctaagtcacagcaaagcagtggcgtgaattcccaggggcaaacacaaaaaaaacaggtttgttattaagatttatcgaaaattgggaactgcatcagaattcagaacgaggagatgggatctgaagggccaagggccattactattcatgtaacaggatttaaaaagtttcaaggggttcctgaaaaccctacagaagccattgtgaataatc

SEQ ID NO: 20352 - DNA, 269 bp, Glycine max
  Clone ID: 700872031H1
tcggctcgagccaactatcccaactccaacgatctgcctttcctagtattcacattaatcaatcctgcatatgctgcacgaagttaactccatgggagtcatcacctgtcacatatgctcctactgataatcaaagtgatacttttttgccgcaaaatgccaatatatttgaaactcttgaatctagtaaaacagctgattcatcaataacagatgctgaaggggttgtagagacagaatctcagccaggcctgcagcttcaggttttc

SEQ ID NO: 20353 - DNA, 258 bp, Glycine max
  Clone ID: 700872032H1
tggggtttgaggaaactgagttaaggcttggactgcctggaaacggaggcactgaagaagtgctcatcaggaagaggggtttctctgagactgaaactggtcatgaagatgagtctgccaccactgtggatttgatgcttaatctttcttctaaggaggccgcaaccactgctgctgctgctgcagatccaactgataagcacaagactttgcctaaggagaagacccttctgccagcagatcctgctaagcctccag

SEQ ID NO: 20354 - DNA, 260 bp, Glycine max
  Clone ID: 700872039H1
aacagctagctgactagtcattttgtcaccgacgagctaattctgtgctagttgtcaaaatctactattgtagcaaaagtttaatctgtgtaacagaagaaactgataggttaagaataaataccgtggaaaatagagtaatggttgtggaatagcaactttggattttcgatattgaaagctcctacacggttcataattatctatgaacggtagttcaagttttgccatgaaattgcaacttcatagttagtttttgg

SEQ ID NO: 20355 - DNA, 259 bp, Glycine max
  Clone ID: 700872040H1
aacttaggtggtctcactgttgagcaggctatccaaaacaagaagttgttcatcttagatcaccatgactatctcattccatctttgaggaaaattaatgcaaataccacaaagacttatgctacaagaaccatatttttcttgaaaaatgatggaactttgacgccattggccattgagttaagtaagccacatcctcagggtgaagcatatggtcctgttagtgaagtctacgtgccttcgagtgaaggagttgaag

SEQ ID NO: 20356 - DNA, 138 bp, Glycine max
  Clone ID: 700872045H1
gtacttttgagcatattcactcaaagaagagaagtaagcttgagcaccaaaagcttcaagacttggtttatgttaagtataaccaagctcttctagatcgctttgtgtgtcatgatgtggattagatcctagttgctt

SEQ ID NO: 20357 - DNA, 84 bp, Glycine max
  Clone ID: 700872048H1
agtttggaaatcctcttgtaacaaaattttcattattcaaccttgatctttatatagcccgcaacaccgagagagatgacaaat

SEQ ID NO: 20358 - DNA, 261 bp, Glycine max
  Clone ID: 700872049H1
gttccaggatgtacaagactcagtattgagggtattgtgactattttaaaagcttacaactctatggatacccaaggggtgaagcatttacacataggtggtctttatggtgttacacaaaagcattttgaagagctgaggttcttgttgggggctgatagtccgctgctcccacactctcacaaatcacactattatcgcaggggaaacttgtacctgtcctgtgatgatgatcaagccatagatattgaagtttgtcca

SEQ ID NO: 20359 - DNA, 259 bp, Glycine max
  Clone ID: 700872050H1
gtgactcatccacatcctggagaggcttcaagcccatcaattgcagcagttgtggcttcgcaagactatcctgaaattacaaagtatgctggtttagtttgtgcccaagttcataggcaggaactcattcaggatcttttcaaacaatggcaagatccagtcagaggaacagtgactggtggaatgatcaagtactctacttccctttttctcatatggaacttcttatatctgttaggagagctacaggacaaaagcc

SEQ ID NO: 20360 - DNA, 258 bp, Glycine max
  Clone ID: 700872054H1
gcctacacaatcacaatcccaaaacacacatcaattccatcaatacaaatcacataaccgtcaaaatggtcaaagctgtcgccgtcctccgtggagactccaacatcaagggtaccgtcacctttgagcaggctgacgagtcctccaacaccaccatctcatggaacatcaccggccacgacgccaacgctgagcgtggcatgcacgtccacgcctttggcgacaacacaaacggctgcacatccgccggtccccact

SEQ ID NO: 20361 - DNA, 71 bp, Glycine max
  Clone ID: 700872055H1
ggaagaaagaatggcagcttgcactgtctactcaacacaatctccgactctgaattgctccatctcaaccc

SEQ ID NO: 20362 - DNA, 245 bp, Glycine max
  Clone ID: 700872057H1
cttgatgcaggagctggtcgtcttggtggaaccacacaatacactgtgaacaaccagatggtgaatgccactctcatgaacattgctgataaccccaccaatgtgcagcttccaggtatgtacaacaaggaagagaacccccgtgttcccatcattgtcaccggtaacgatttctcaacactctatgcacctctcatccgtgatgggcgtatggaaatgctctactgggcaccaacaggggaacg

SEQ ID NO: 20363 - DNA, 255 bp, Glycine max
  Clone ID: 700872058H1
gggggaaacacttctatatatgtttcatgaacctgttcttctcatcctttcttttcctttttggacaattcatttaaacttgtatttggataactctatgcttaatttctaagcattaatatgatgatacttctgtggctaaaaaaaaaaaaaaaaaaaaaaaaaaaaaaaaaaaaaaagggggggccccaaaaaaaagaccccgctacccgggaaataatttcgggggggaaccttgggggggaaaaatttttc

SEQ ID NO: 20364 - DNA, 222 bp, Glycine max
  unsure at all n locations
  Clone ID: 700872060H1
gtgtggggctcaaagtggaatgaaagagcatacttcagcacaagaaaagtgaaactcgaccacgaatatctttccatggcagtcctggttcaggaagtgataaatgctgactatgcttttgtcatccacacaactaaccgttggactgganattcatcggaaatatatgctgaggtggtaaagggacttggagaaacactggttggagcttatcctggtcgt

SEQ ID NO: 20365 - DNA, 253 bp, Glycine max
  Clone ID: 700872063H1
ggtgattcctggtgaatatggtttcgttgcccagcttaacgagggtcgtcacctcaagaagaggccaactgagttccgagttgataaggtccttcaaccctttgatgaaaacaaattcaactttaccaaagtcgggcaagaagaggtcctcttccaatttgaagctagcgaggatggacaagtccagttctttccaaatgctccagttgatgttgacaattctcccagctttgttgccatcaatgtcagtcct

SEQ ID NO: 20366 - DNA, 228 bp, Glycine max
  Clone ID: 700872064H1
ctcgggctcgagccgcacacggggaacagcacagatgatttcttctgggggcttcttgaagaagacattattcaactttgcttattcatataagcttaataacatgaagagagggcttagacatggagaagcatcttcacttcttgataacattgtgtttgacaaggtacagcgatgtttatggggtagagtacgtcttatagtgtctggagcagcacctgtatctgc

SEQ ID NO: 20367 - DNA, 257 bp, Glycine max
  Clone ID: 700872066H1
caccaacaagtgtttctgtaaccatggcatccaccactctatcccctacaaccccttctcagctatgctcaggaaaaagtgggattttcagttcctcacaggcacttcttgtgaagccagtgaagaggcagatgatggggaagagcaagggattgagaattgcatgccaagccaccagcatttccgctgatagagtccctgacatgggcaaaagacagctcatgaatcttcttcttcttggtgccatttcactcccc

SEQ ID NO: 20368 - DNA, 209 bp, Glycine max
  unsure at all n locations
  Clone ID: 700872014H1
tctcctttgacgacaagatgagcatcccaattccccgtcggcagttattcatagacggagactggaaagtccccgtcctcaagaatcggattcccatcatcaacccttccacacaacatacgatggtaggatatncnancagntantaangatgacgttgatctcgatgtcgatgtcggcaaagcggccctctcccgcaacaagggcgc

SEQ ID NO: 20369 - DNA, 233 bp, Glycine max
  Clone ID: 700871964H1
gcacctccttggtgataccattgtgcgaatccaagttgggatgggaccagcaggtgagttgcgttacccttcgtacacagagcaaaatgggacatggaaattcccaggaattggtgctttccaatgctatgacaagtatatgttgagtagcttaaaagctgctgctgaagctcacggtaagcctgaatggggaagcacaggccctactgatgctggccactataacaactggc

SEQ ID NO: 20370 - DNA, 230 bp, Glycine max
  Clone ID: 700871965H1
gtactgtatgcaaggcataacgagatcgtcgtcatacatctgtggtcgctgcctgcggcctcggacaaatgcttccatcagtggagtgcgcagtacccggtttcaatcgaacgaggcgccacggaccgcaataaacaccgagtcggacaccacggagcaagagagaagacaagatggagccaggccggagcaagagcagggagcaatgtcacgaagactggaggagatgg

SEQ ID NO: 20371 - DNA, 226 bp, Glycine max
  unsure at all n locations
  Clone ID: 700871969H1
atagcatcactatggctcttctgagtcgagcctcttcacgcttccctcagctggtttcccctcaaagagctgtttccctccacacaacgctcgcatcccttaacgcatcaacatccacacccacgcccgccccatatgccccgccaccgcctccgtccgcttcccctcccgccggcgtgtcgaaggcggcgnagttcgtgatctcgaaggttgacgatctgatgaa

SEQ ID NO: 20372 - DNA, 224 bp, Glycine max
  Clone ID: 700871970H1
atcaataacaatattattctcctcattccttcatttttaaacctagctccatctcccttcactcaccataactatccatcagaagcatatcctgccaacaccaacttctgtgtaaatgttagcaacaatggctacattagtgctaatgaccccttgaactggggtgcgacggcggaggctatggctgggagccacctcgacgaggtcaagcgcatgctagagga

SEQ ID NO: 20373 - DNA, 223 bp, Glycine max
  Clone ID: 700871973H1
acaaaactcagacttaacttcaacacattttctttaattaggcaaaataaacttcaacacataatataaggtcaaaacttacatacaatttcataggtacttatgttactattctccaatcaaattagaattctactttgataatctatgttgacttttaaagaaaactcttattacaaagattactgggttaaaattccaattctgattagagacaagacaa

SEQ ID NO: 20374 - DNA, 219 bp, Glycine max
  Clone ID: 700871974H1
agagaagaagaatcttaatcgatcatcacttcacttcactaatacatcatggcagacgagacccagaacaagtatgagagctctgaggttgaggtccaggatcgtggtgtttttgactttctcggtaagaaaaaggatgaagaagacaagcctcatcctcaggaggaggtcatcgccaccgagtttcaaaaagtcactgtctcagaccaaggagagaac

SEQ ID NO: 20375 - DNA, 234 bp, Glycine max
  Clone ID: 700871975H1
atccggttcgatgtggtctacgccacgcccatcggaggaataagcacactaacgggaactggtgtgaacttgataataatcggaatgtggaagagcctcttccctgaggcaaaaccaataagcttcaacacgtggttcttctaatggttccctgttgctgttctcatcctcatttgtttttggtgcatcatttgcctcctctatgtgccaaaaggttcgggtacggctttgtct

SEQ ID NO: 20376 - DNA, 233 bp, Glycine max
  Clone ID: 700871979H1
tcgaggggcaccaacaagggatgaccgcattggtgtctgcactggaatttttcgcaccgattcaattcctgaacaggacgttgtcaagattgttgacaccttccctggccaatccattgatttctttggtgcactgagggccagagtatatgatgacgaagtgaggaagtggatttctggtgttggtgttgacggcattgggaagaagcttgtgaactcaaaagatggacctc

SEQ ID NO: 20377 - DNA, 225 bp, Glycine max
  Clone ID: 700871981H1
aacttctctttcgtttctcatcatcagagacttacactccaatttccataccgaatcgaatttgaatttcgatttgaatttcaatttcattttcaacttccctgtgatgccttactcggtccgcgagaacctttcgatcgggaacatcggcgacgcggcggagattctcgaaaacggcgccgtccagagcgtgacacacatcctctccgtcctcagctccgcctc

SEQ ID NO: 20378 - DNA, 223 bp, Glycine max
  Clone ID: 700871984H1
cgccaatcaggctcacatcagcaacaacaccaactacaattgtgatgctaatgtcgagaagaagtcacttgtactacatgtccttggtattgaaaacaaggaagtcaacgctagaatgctcttcaatgttttcagcaacttcggcaatgtcgtcaagctgatcttcatcaagactagagcagtcgctttggttgagttcgataacatcgtaagctcaattaat

SEQ ID NO: 20379 - DNA, 208 bp, Glycine max
  Clone ID: 700871988H1
cagaatcgtaagctcgacaaagaagcaagcaaggttattattctttgtggttgcggaacgaagcatgctgttgctgttcgagaatggatgagttgaacggcgccatgacgacggagaatagcaatgcggaggtggttcgatgggagaggtttctgccgcggatggtgctcagagtgctgcttgtagaagctgatcattccacacaaca

SEQ ID NO: 20380 - DNA, 224 bp, Glycine max
  Clone ID: 700871989H1
ctccctctcagtgttatacatttcttgtagagctgaactctatgaaaattaaatcaaccaagtcgtaatgcgggtctcttcgaggtagtcatttcctggcattatctgtgttcggggttggtcatgattgtgagtccagttgccaatgctcaagactcaccaacagattacgtcaatgcacacaacggctgcagctcagatgtgagcgttcacaacttggcttt

SEQ ID NO: 20381 - DNA, 217 bp, Glycine max
  Clone ID: 700871990H1
caggagttggagaatgtattaaaggtgaaattgcctcttcctacaaggatcctttatcgctttcacaatgggcaagaatttgcaaaggcagatccagaaactagtacatttggcagatctttgggtctaattggtggctactccttctatggtcatttggtgaatgtttatctattacctatatgtcagataatcctagcaactcagcaaactaggc

SEQ ID NO: 20382 - DNA, 202 bp, Glycine max
  Clone ID: 700871991H1
ggccacgatcctgctcctgttcacggtcttcgcgggttcatcggccctagacatgtcgataatctcgtacgacaacgctcacgccggcacgtcgcgcacgaaagggtagctgatgtccatgtacgagcagtggctagtaaagcacggcaaggtgtacaacgcgctcggagagaaggagaagaaggtccagatcttcaaggac

SEQ ID NO: 20383 - DNA, 190 bp, Glycine max
  Clone ID: 700871992H1
ctctactctactgcttcactttctgctcaagaaaattcagtggtgatacatggcttcggctaatctctctgtagccaaaccagcacttcaggcaaatgggaaaagcttctctgaaatctcctgccttcgcagctcatcaggcttccttcgcctttctaggagatcttcagaggatttccattctgtcaat

SEQ ID NO: 20384 - DNA, 222 bp, Glycine max
  Clone ID: 700871993H1
tggattccatggaagtctcaaaagaagaagctcgagtggcacccgcaccggccctagtggcgatgaaacatcccctggcatgggccacctaatcccaatgatcgagttcgcaaagcgagtggtgtgctaccataacctggcggtgagcttcgtgatccccactgacggcccaccttcaaaagcccaaaaggcagttctggaggcccttccggactcaatttc

SEQ ID NO: 20385 - DNA, 216 bp, Glycine max
  unsure at all n locations
  Clone ID: 700871994H1
atcatctggcntcatcttgtncccccnngnngnncactcattcgatctgccccgttcatcagctggaatatnttctagcaggggtacacgtgaaactggagttatagttcgcgtggaggatccaatgacgattcttcagaaaggatattcttttacgattggtttagctggtctgggcatcgggttgtctacccggtggttactttacactgagca

SEQ ID NO: 20386 - DNA, 212 bp, Glycine max
  Clone ID: 700871995H1
ccgcttgcttgttgcaaatgttggggattccagagctgttatatgcaagggtggtaatgccattgctgtttctcgagatcacaaaccagaccaaactgatgagaggcaaaggattgaagaagcaagaggctttgttatgtgggcaggaacttggagagttggaggtgttcttgctggttcccgtgcatttggtgatagactcctgaagcagt

SEQ ID NO: 20387 - DNA, 264 bp, Glycine max
  Clone ID: 700872003H1
aacgcccagaagttgtgcctggaaccaacttccttcacggtgaaggcagagggcgtggccaagaacgccccacccgaattccagaacaccaagctcatgcctcgtctcacctatcccctggacgagattgagggtcccttcgaggttacatccgatggaaccgtgaaattcgaggagaaagacggaattgactatgctgctgtcactgttcagcttcccgggggagagcgtgtgccattcctctttaccattaagcagttggtg

SEQ ID NO: 20388 - DNA, 262 bp, Glycine max
  Clone ID: 700872005H1
catgccatggcttgtctgagccgctaccaccaccaccaccacccccgcggcgccacctggctctcttcccctgacgaaatgctccaacactgccccctctccgcccaccaccgccgtctccgcgatgacgacgccgaacctatctaccttccctctctctcctccgcctaccgcatcttccccgtctacgccatgggcgcccccgacccgacaccagaacccgaattagacggacccgacccgatttggaacgctgtcaggg

SEQ ID NO: 20389 - DNA, 260 bp, Glycine max
  Clone ID: 700872006H1
ctctgctcgtgcctctagggttatcatatctccatttccatttcctctctctcagtttccaagaatcttaagctatgggaaagtcttacccaaccgtgagcgctgattaccagaaggccgttgagaaggcgaagaagaagctcagaggcttcatcgctgataagagatgcgctcctctaatgctccgtttggcatggcactctgctggaacttacgacgtgagctcgaagaccggtggtcccttcggaaccataaagcac

SEQ ID NO: 20390 - DNA, 259 bp, Glycine max
  Clone ID: 700872007H1
aaaactatcccaactccaacgatctgcctttcctagtattcacattaatcaatcctgcatatgctgcacgaagttaactccatgggagtcatcacctgtcacatatgctcctactgataatcaaagtgatacttttttgccgcaaaatgccaatatatttgaaactcatgaatctagtaaaacagctgattcatcaataacaaatgctgaaggggttgtagagacagaatctcagccaggcctgcagcttcaggttttc

SEQ ID NO: 20391 - DNA, 263 bp, Glycine max
  Clone ID: 700872009H1
ggaaagcccgtctccttcacagctgcatctcttgcaccagaagttcagagtgcgattccttctggattagttaggaagagcccttatctgacgcaccctatctttaacacgtaccaaactgagcatgagttgcttaggtacttgtataggctacaatcaaaagatctctcactatgccacagtatgatcccacttggatcttgtacaatgaagctgaatgcaacaactgaaatgatgcctgtgacatggcccagctttagtga

SEQ ID NO: 20392 - DNA, 284 bp, Glycine max
  Clone ID: 700872010H1
cggctcgatatccgactaactgagaataaacattatggtgtcgacgttcgagaagaagaagtacctgagctagctcatcatcccttcatcttcttcttccccaaatccatccgcatcattcccacacgtcattttcagtaggtcccactccttcgtgggcccctctcctctcctttggtcccttctcgccacccctctacttctgctctcgaagagagaacgaagtctgaatgaagaagaagtgagaattgaccattttggtcccgactcccccaaaaatttgg

SEQ ID NO: 20393 - DNA, 238 bp, Glycine max
  Clone ID: 700872012H1
ctaatttaagggtggtggtgattaggttattagcccttagggtatataaatgttgagtacctcttcttattctgtcttcaccctctcctttctccccaatccagttaagggtatcccccgaccagctacacttcgaccttttcctgggatcttggaatctcatgccaagtctccaaagaacagattgaatattttgtggcttaaggcacgaaccatcatttctccagaaaacacccca

SEQ ID NO: 20394 - DNA, 267 bp, Glycine max
  Clone ID: 700872013H1
attcggctcgaggttagtctctcacctatcaccgtcctcttctaacatttttttcaaaaaccgaaaatcatgcacatttttctgttacttacttgttgccttgatctatagcaccgatgaggttaataatcgtttgtttgcttcgttttaccgtcgtatattctttgttgtgattttgatgatggaaacggcgtgggggttttcaacccatagctgcggtttcggatgatgaattttgcgtaaatgctgttttatctttgtttttgt

SEQ ID NO: 20395 - DNA, 229 bp, Glycine max
  Clone ID: 700871960H1
gcagccacatcagtttgggctatgactgccctcataaaaaaccctagagtaatgaagaaagttcaagaagaaattagaaatgtgggaggcacaaaagatttcttagatgaagatgatgttcaaaaactttcctatttcaaggcaatgataaaggagacatttagattgtacccaccagccacactacttgtaccaagagaatcaaatgaagagtgcattatacatggct

SEQ ID NO: 20396 - DNA, 229 bp, Glycine max
  unsure at all n locations
  Clone ID: 700871908H1
ctgatatgaaaattgtcccgggaaaagcaagttgtttagataggtttgtatgactcttctaganattctaagtatctagaaaatgttcaacaatttgttggtagtgatcaggctaagcctagagtgaggagttcacagttatcgcttaaaggcactatggtggactcagcagattacgatgaacttttctattttcatgaaacaccaggacaggaatttggtatggatt

SEQ ID NO: 20397 - DNA, 233 bp, Glycine max
  Clone ID: 700871909H1
ggcattcgctttttccagctatatgtgtacaaggacaggaatgtggttgctcagcttgtgagaagagctgaaagggctggattcaaagccattgcccttactgttgataccccaatactaggacgcagagaagctgatatcaagaacagattcacattgccgccatttttgacattgaagaactttgaaggattggaccttggaaagatggacaaagctgatgactctggact

SEQ ID NO: 20398 - DNA, 230 bp, Glycine max
  unsure at all n locations
  Clone ID: 700871910H1
atgagatcctatgaaagtaaaaatcttttntatnttacttataaatattactataaatattgggttgaattgagcgggtcgtacttaaataagaatttcttttccttttttcttagtttctatcgaaaaaaaaaagattcgatagaaactaagaaaataaccaaattgattcgccgagaaagaggagagagagggattcgaaccctcgatagttctttgttccgaactat

SEQ ID NO: 20399 - DNA, 228 bp, Glycine max
  Clone ID: 700871912H1
gaagaagcagaaggagtagcggcattaaaaatgcagttcctcgtgaaaaatctgacaagggaggactaataaccctcgaggtcgagagcagcgacaccatcgacaatgtcaaggccaagattcaagacaaggaaggcattcctccggatcagcagcgtttgattttcgccggaaagcagcttgaagatggaaggaccctggccgattacaacatccagaaggaatcaa

SEQ ID NO: 20400 - DNA, 231 bp, Glycine max
  Clone ID: 700871913H1
tcgagttctattattggaggataccaaaaccatctctgaatactcaaagtttcatatctgaagcaagttttcaagaaactgctagagttttatcaaaagccgctctccgggggcgcatagattggttgaaaggtctgaaagagaacgttgttttagggggaatgatacctgttggtaccggattcaaaagaataatgaaccgttcaaagcaaaggcaatataacaagatga

SEQ ID NO: 20401 - DNA, 242 bp, Glycine max
  Clone ID: 700871916H1
taacaattcgcaacacacatcgctaaaatcaccaatactgtcatattcaaaccccccatctctcatcacccatagcagcttctttattcgcaccgctcttctctacgctttctcaccaaatttaaaaccccctccggagcgaattctcggcggctggttccgaaagccacggcggctcccggggccaagaagacagaaaagccgcacgagagagtccagcgagtccacagcgtgtaggagtt

SEQ ID NO: 20402 - DNA, 237 bp, Glycine max
  Clone ID: 700871917H1
caaaaagatatctgcagtctcgatattttttgagacaatgccatatcgattgaatgaaagtacaggatacatcgactatgaccagatggagaaatctgctacactcttcaggccaaaattaattgatgctggagctagcgcttatgcacgtctctatgattatgaacgtgtacgcaaggtttgcgataaacagaaagctatactattggcagatatggcacacatcagtggattggt

SEQ ID NO: 20403 - DNA, 233 bp, Glycine max
  Clone ID: 700871918H1
ggagtttgttagtgttttgatgcattataagataccaatggcattggtttccacgcggcctaggaaggctcttgagtctgctataggggagattgggattgaggacactttcagtgttattgtagcagcagaggatgttcataggggaaagcctgatccagaaatgtttgtgtatgctgcacagcttttgaacttcatacctgagaggtgcattgtgtttggtaactccaatc

SEQ ID NO: 20404 - DNA, 232 bp, Glycine max
  Clone ID: 700871919H1
tcttacttgaagaaggttggttacaacccagacaagattccctttgttcccatctctggttttgagggtgacaacatgattgagaggtccaccaaccttgactggtacaagggaccaactctccttgaggctcttgaccaaatcaatgagcccaagaggccctccgacaagcctctaaggcttccattgcaggatgtctacaagattggtggtattggtactgtgccagtgg

SEQ ID NO: 20405 - DNA, 232 bp, Glycine max
  Clone ID: 700871920H1
gtgcggcgcacagaacccgttgaacgcttgaagccaccccgacgccgtcgaagagagagcgagcaacaatgtcagacagagaagacaacgcccctgaggaattcactgccgaacagggtatacaacaagacgaagagattcgaaggattcaaagagaaaataaggccagggttgttcgtgaaggaaaagagcgtcggaggagatgggcccaaaaaataactcctcgaccatc

SEQ ID NO: 20406 - DNA, 231 bp, Glycine max
  Clone ID: 700871921H1
atctggattcaactaatttacctttcacaaccgaacttgaacatcagccaactgtggttccaaatcaagacgtgcattctgattcaaatttggaagttgattcacattctcattcacatgaagtttttgtgcaccctgcctcaaattcagaccctaatacagttacacctagtgaagtaagagtgcaatctgcagacacaacaaatttgtcgactcctttggagataaatt

SEQ ID NO: 20407 - DNA, 230 bp, Glycine max
  Clone ID: 700871922H1
aaaaaaaatatggaaaagaaacaagattaagaattggggtttgaagaagccggtggtgtctccttgcttgttctcgatcgatcttgttattgtaaaatataataacttttttatatcgtgatcaagatgcgccgagggagagccaccgccgccgtcgtggatccgacggcggagcaggcgaaggagacgcggttccgcggcgtcaggaagcggccgtgggggcgattcgc

SEQ ID NO: 20408 - DNA, 229 bp, Glycine max
  Clone ID: 700871923H1
ggcaatttagcttcactgttagggccatccaatcagaaaagccaacctatcaagtgattcaaccaatcaacggtgatcccttcattggaagccttgaaaccccagttacatccagccccttgattgcatggtacttatcgaacctccccgcatacaggaccgcagtgagcccactactaagagggatcgaggtgggcctggcccatggctaccttctggtgggcccatt

SEQ ID NO: 20409 - DNA, 116 bp, Glycine max
  Clone ID: 700871924H1
ggaaggatttgatggaattcttgaggtctggcacggtcgcaaagactcccctcttgatgtcattgccatcaacgacacggcggcgtgaaacaagcctctcacttctcatatacgat

SEQ ID NO: 20410 - DNA, 230 bp, Glycine max
  Clone ID: 700871925H1
caaaataagaaagtttcacccacaagttctgctaaatttagagtgctggcaattaagtctgacaatagcatcatcaacaggctagagggtctacttaatttggatatcactccattcacggacaagataattgctgagtacatttggattggggggacaggaattgatgtgcgcagtaaatcaagaacaatatcaaagcctgttgaacatccctctgagctccctaaatg

SEQ ID NO: 20411 - DNA, 228 bp, Glycine max
  Clone ID: 700871926H1
gcagaaccagccctttgtagactactattgccagttaccaactcaaggggtgcattctatggtggtggtggtggtatgcagttcttcaagcaattggtggcggccatgtttgtcattggatggaacttggtgtccaccaccatcattctccttgtcataaaattgttcatacccttgaggatgccggatgagcagctggaaatcggcgtcgacgccgtccacggcgag

SEQ ID NO: 20412 - DNA, 226 bp, Glycine max
  Clone ID: 700871927H1
gtctgacattgttttgttcccgaactctttgctctgctttttggatcggtttgaaaaaaatttgaagagatttattagcacttcccagcaataacacgattagcctctcttctcagtttcaattcgttttcaattcttgccgcatcgatttccaaccctaatattctaccatgactgagtactgggtcagccaggcaacaaatggtgcgacttttcaaaatttata

SEQ ID NO: 20413 - DNA, 234 bp, Glycine max
  Clone ID: 700871930H1
gtaaagtgaaggtgtatagcatggccaccaattcttggaggaagattcaggattttcctcatggtttcttaccctttcaaaattcagggaaatttgtgagtggcactctcaattgggctgcaaatcattctattggcccaagttccttctgggttattgtttccttggatctgcataaggaaacatatagggaagttctgccacctgattatgaaaaggaggactgctccaccc

SEQ ID NO: 20414 - DNA, 236 bp, Glycine max
  Clone ID: 700871931H1
ctgaattatcgtgttttgatcagaatctgaggagagaatcacataatttcgaatttgagttttcgtgtagaaaaaggaagagaagaaaatggaatcggaggatttggtcaaacaggaattggaggaattgcagaaacaattggggaagaagcaaaagtttgaagcttctgtttcgtctcttaaaacccttctccaacgcacttacccatcagcttccccggcgcttcgtaaatcct

SEQ ID NO: 20415 - DNA, 233 bp, Glycine max
  Clone ID: 700871934H1
aatggccttcgccaccagcgccttggtttgttcaaacttgctcggaaggaaggttctagtcacaagcaaatcatccactccactaccatttcttttcaagagaagcatcttaaaagctcagatctcagagcaagtcaaatccgcatcttcacgggctgctctagctgcacttatcgtctcctccgggagcctctctgtgaccccagaagccctagccgctgataacttgaccc

SEQ ID NO: 20416 - DNA, 230 bp, Glycine max
  Clone ID: 700871935H1
cacgattgcactatcactccaattttgcggataatagagggcacatcgatcactctgcacgggtcatgcgaattattacatggaaccgatcctttaagggaatacctaatttagatgatgggaaggatgattttgactcggatgagcatgagacgcatgccaccatcttggacaagttgttagcgtgggagaagaaactctacgatgaagttaaggctggtgaactaatg

SEQ ID NO: 20417 - DNA, 227 bp, Glycine max
  unsure at all n locations
  Clone ID: 700871938H1
ctgagtcttgcaattgaagttgaagtcttgcccttctctcttcaactccacacacaatacattattanccatggcngccnccgnctccactgtcggagctgnccacagagctcttttgaacctgaatgggtctggacctggggtttcagctcccagttcatccttctttgggagcagcttgaagaaggttattggctcaagggtccccaacacaaagatttcgtctg

SEQ ID NO: 20418 - DNA, 228 bp, Glycine max
  Clone ID: 700871939H1
ttaagatactgttccggcataggtttcctcttgggttccatagacccagcaagtttcagtcaaagtgtgttctgttttcttagcttaatcaattcatttcttatcccccctcgtgcccaaagattctccgatattccagtggtggtttttcctatattgtcgtttaactgttttcccaagatcttcagaaacacatccaaagcggttatatcggcgatttgtgatgtg

SEQ ID NO: 20419 - DNA, 227 bp, Glycine max
  Clone ID: 700871950H1
tgtatttcctctctcccatctctactagctgtgactgttgtcagaagcattgaggaagttatagagggagtgacttaggaatactaaaggatgtagagcttcttcggcagatatctgatgcttcgcgtggagcaattacttcctttgtgcagaggactactaataagaagggtcaagttgttgacgtagctgataaacttacctcaatccttggatttggcataaat

SEQ ID NO: 20420 - DNA, 95 bp, Glycine max; identical to SEQ ID NO: 719
  Clone ID: 700871951H1

SEQ ID NO: 20421 - DNA, 227 bp, Glycine max
  unsure at all n locations
  Clone ID: 700871952H1
gtcaacaccacatatatcttctantctntgctctgctctgcttagggttccaacttcaaacccatcagcacttatcgttctcatgcaacaagggaatatgaggcctattttctgtggaaattttgagtatgatgcccggcagtcagagctggagcggcttattagacgatatgggaaggttgatagggtggatatgaagtctggatttgcttttatctatatggaag

SEQ ID NO: 20422 - DNA, 225 bp, Glycine max
  Clone ID: 700871956H1
cactgttggaccttttggatacatttgttacaaagaaaaacccttgtcttttgtatgtcaaagcaagctcgaaatgtttaggataaccgaaagtgacatggggtgcttgccttcaagcttcatgaatcttagaagacagcgatatctgagagttctagatccgagggagcttcgaatgatagaaagtggctctgtagatgtcatagattgcaaatcattgaagca

SEQ ID NO: 20423 - DNA, 197 bp, Glycine max
  Clone ID: 700871958H1
tggcgaaggagatagtgaaagagcttcttcctctaattcgagtgtacaaggatggcagcgtggagcgtcttctaagctctgaaaacgtggcagcctcccctgaagatccccaaactggagtctcatccaaagacatagtcatcgcagacaacccctacgtctccgctcgcattttccttcccaaatcccaccacaca

SEQ ID NO: 20424 - DNA, 232 bp, Glycine max
  Clone ID: 700871907H1
cgaaatcctcacccattttcttcgtagccaaacactctgaaattctcagttatgtcgtggcaagcgtatgtggatgatcacctactgtgtgaaatcgaaggtaaccacctcactcacgccgctatcatcggccaagacggaagcgtttgggctcagagcaccaacttccctcagttcaaacctgaggaaataactgccatcaataatgactttaatgagcctggatcacttg

SEQ ID NO: 20425 - DNA, 247 bp, Glycine max
  Clone ID: 700871867H1
caattttctgacttagtgatgatagtttaagcaagttgtgctgattttactggtttttccatgtttaattatggtcttgtgcctttatgtgcatattctgtggttaactgttgtaggaaatagtagcacttggaaaactaagtaacagtttttgcagcttatggctttaatggtaggcggtagctctagggaatgttaaaatgttgagtgattctttttagtgttaaggatttttgtttccatgagt

SEQ ID NO: 20426 - DNA, 244 bp, Glycine max
  Clone ID: 700871868H1
gagaaattctcaagcaagattcacctccgactgtgtcttgaggccggctaccacgtgcttgatgagtccacgcatttcagcagtgatcttcagccatcctccaaacatttgaggaagaaaaacattggaattctcgaacttgggatcctgagtgcccgcaatttgctgcccatgaaggccagggaagggaggactactgatgcatactgtgtggccaagtatggcaacaaatgggttcgaacca

SEQ ID NO: 20427 - DNA, 246 bp, Glycine max
  Clone ID: 700871869H1
gataattggtcacactttttttatgaaatggattgaatttatattagtccgcatacagcaaactaattcgattaaatctaacgtacgtattcaatcaaataaatacattatgtcagaatttagaaattctatgttgaaaatctttcttgttttcttatttattacttgtttatattatttaggaagagtacccccccctttttttagtaagaaattgtcagaaattcaagaaacccatgaaattta

SEQ ID NO: 20428 - DNA, 119 bp, Glycine max
  Clone ID: 700871870H1
gtttgaaggatcacacaaactagtaaccagaaaaatggcagaaacaaagttgagctccttcaaagacaaaagttggtcactccatggcatgacagctctagtgacaggaggcacacgag

SEQ ID NO: 20429 - DNA, 245 bp, Glycine max
  Clone ID: 700871873H1
gttgtgagatgcaaccccatcaccccatcaggcctcacaatcagagctggttcctatgctgatgagctcgttaagaccgcgaaaacagtggcttcaccagggaggggtattttggccatggatgagtccaatgctacctgtgggaagcgtttggcttcaattgggctagagaacactgaagctaaccgccaggcgtaccgtaccctccttgtgacagttccaggacttggtcagtacatctctgg

SEQ ID NO: 20430 - DNA, 246 bp, Glycine max
  Clone ID: 700871875H1
atttacttgttaagtggatctcatcatcttttctacaattagatatggacctttctcctgaaaaagttatcatttttctctgcaagcttttcagacattccttctcgactactatacatatgctgatcgctgatcaaataattggaatacacaacaagtttcaaaagctggaagaggtatgtcctgccatggaaaaacaaattactaagtggacaaaagttcttctaagtagtgaaaggcttctgg

SEQ ID NO: 20431 - DNA, 244 bp, Glycine max
  Clone ID: 700871877H1
cggactgtcaacagagctcttttgaacctgaatgcggctggacctgagggtttcatgctcccagttcatccttctttgggagcagcttgaagaaggttattggctcaagggtccccaacacaaagatttcctctggaagcttcaagattgttgctgtagaagagaagaaagagattgaagagacccagcagaccgacaaggacagatggaagggtcttgcctatgatatctcagacgaccaaca

SEQ ID NO: 20432 - DNA, 247 bp, Glycine max
  Clone ID: 700871878H1
gttaatatctcgtgctgctgcaagaactgtaaggagggcctttttataacatggatgaagtagctgaagctgaaatctttttgtacttctcaacaagtgaccggagaacattgaaaaataaataaggctttatgacaaggcctttaatccttaatgcttcaatacactgttgattcaacaacatattcttcgctttcaatttcattttttttttattaattttatcttcgttgtaagtatttatagg

SEQ ID NO: 20433 - DNA, 244 bp, Glycine max
  Clone ID: 700871879H1
aaaacaataaatgtggatgatctgttatctaagatatggtctatggagttcaactaatcaacagattgtttaaatagaaattaggtgctcttcttttatctatctaatagagatacaggcacctcactaacttggtgaaaatggtatataaacaatctgttcattagttgaactccatagaccatatcttagattgcataaaacaataaatgtggatgatctgaaatctttattgaaagatggt

SEQ ID NO: 20434 - DNA, 246 bp, Glycine max
  Clone ID: 700871882H1
gttgatgaaagggttttgccggggttcccccgacagttatggttaattggttgcataaaggatttgaacatcccggggagttgactactaagattggctccttgcaaatgttcatagagaataatggaagctgcgaagatatgggccctgggggtttcccagtgaaggaagtgtataaaatttcagtagtggacatgcgactcgcaaacgcagatagacatgctgggaatattctgatcggcaaag

SEQ ID NO: 20435 - DNA, 244 bp, Glycine max
  Clone ID: 700871883H1
gtgggagggagatccaaatagagagagtggaaaagatggcgcggttgatcacagtggtgtggtgcgcggtggcggtgctattatgcgccgcggccggtgcgtcgtgggtggaggaggcggcgaacccgatacgaatggtgtctggcgtggaggcggaggtggttcgggtgatcggggagtgccgccgtgcgttgaagtttgctaggttcgtgagcaggttcgggaagagttaccaaagcgagga

SEQ ID NO: 20436 - DNA, 245 bp, Glycine max
  Clone ID: 700871884H1
gcacaaagcaaagctcatccttgagttataaaatggcagcagcttcttccatggctctctcatccccatcctcggctggcaaggccgtgaagctgggcccatcagccccagaagtgggaagggtgagcatgaggaagaccgtcaccaagcaggtctccttaggaagcccatggtacggcccagaccgagtcaagtacttgggcccattctctggcgagcccccgtcctacctaaccggtgagttc

SEQ ID NO: 20437 - DNA, 120 bp, Glycine max
  Clone ID: 700871886H1
tctcctttgacgacaagatgagcatgccaattccccatcggcagttattgcatagacggagactggaaagtccccgtcctcaagaatcggattcccatcatcaacccttccacacaacat

SEQ ID NO: 20438 - DNA, 242 bp, Glycine max
  Clone ID: 700871887H1
gtttttgatgctgaaagatttattgatgtcatgcaagactttgaaaattttattactgctgccaaaagtggtggtggagaggatatgaatggcaatatggcagagcttgggattcttactactagtcagtcagaatatttgttgtcaggattccaatctgttatgcctcaatcaccgcagccagtgcaaacaagagcagctttagcatttttgttgtccgataggggcaattttttccgaga

SEQ ID NO: 20439 - DNA, 244 bp, Glycine max
  Clone ID: 700871888H1
ctcgagccgctcgagccgattcggctcgaggcctttatttcacttattcacatcaagcatagaccattggaacgtaagagggtaatattgttctcgtatacaagtggcttaacttccacaatgttctctttgctattacgtgaaggtcaacatccatttagcctgtcaaacattgataaaatgatggatgttgctgggaaattgaagtcaagacatgagtttccaccagagaaatttgttgaaa

SEQ ID NO: 20440 - DNA, 243 bp, Glycine max
  Clone ID: 700871890H1
ctagtttagttcagtacttcagcatatgtgaaatctgaaatgaaatgagaagaacaatgtcaaaggtatcatcagcatgctctcattttctttgcttttgtagttgtagcagctcttcatgttgaatgccgttctcttcggcctagtgtttctgatggagttgatgcaattcaacctcaagagtcttatctacaactcaataaagaccaaagggttgttgttgagtcttcttctgatgatgat

SEQ ID NO: 20441 - DNA, 243 bp, Glycine max
  Clone ID: 700871891H1
tggcagagcaattttggacttgagacagaggaagcatacccctacactggaaaagatggtctatgcaaattctcagctgaaaatgttgccgttcaagtcattgactcggtcaatatcaccttgggtgctgagaatgaattaaaacatgcagttgcatttgttcggccggttagtgtggcctttcaggtggtgaatgggttccatttctacgagaatggagtttacactagtgacatttgcggt

SEQ ID NO: 20442 - DNA, 241 bp, Glycine max
  Clone ID: 700871892H1
aaaacaataaatgtggatgatctgaaatctaagatatggtctattgtgttcaactaatgaacagattgtttaaatagaaattaggtgctcttcttttatctatctaatagagatacaggcacatcactaacttggtgaaaatggtatataaacaatctgttcattagttgaactccatagaccatatcttagattgcataacacaataaatgtggatgatctgaaatctttattgaaagat

SEQ ID NO: 20443 - DNA, 244 bp, Glycine max
  Clone ID: 700871893H1
tgcaaggttaaattgtgtctcaaagttagattcgcctgtgtagttcatacaacttacccatgaagaaaattttgaaaacttgtggaggcttttgacaggaatgtgtatattgtaatttttcctgacaatgtatcccaggaacatttgcttccaagtttaggcccatgtttttgacttggttttggcaaagccaaagaagatgatgatcattttctcatgttttgaatgtgataactgaacacaa

SEQ ID NO: 20444 - DNA, 240 bp, Glycine max
  unsure at all n locations
  Clone ID: 700871894H1
cacaagcgcaccaggaacatggaggtggatgttaggagtagcagcagtaccagcattgacacaaatcatattgatggttttgctcccagaatcacctcgttggttgttcagaaagggtaaacaagaagaagccagagatctnntgaggaggattaccctccccaggatgttgaagatgaaatcaatgctttgaaggaatcaattgaaacggaactcaatgaagagcttcagcttcaaaca

SEQ ID NO: 20445 - DNA, 247 bp, Glycine max
  Clone ID: 700871895H1
gttcacacagcactttcccatcaatcaagaagcgacttgataaggaaattgaaacaaacgtctcgatcactgttgctccatcagaaacgggagaagcccttaaggtctcaggtcgaggagaacttcaacttggagttcttattgaaaatatgagaagagaaggattcgaaatctcagtttctccacccgaagtcgtcttcaaagaggaaaacggaaagaaattcgaacccatcgaagaagtcactat

SEQ ID NO: 20446 - DNA, 218 bp, Glycine max
  Clone ID: 700871901H1
cgaaggtttcctattcatcagacatggtgaaggcaatcagagttcacgaactcggtggccctcaagttctgaagtgggaggatgtggaaattggagatccaaaagaaggcgaggtccgtgtgaggaacaaagccattggggttaatttcattgatgtctactttcgcaaaggagtttacaaagccccttcttttcccttcactccaggtatggaagct

SEQ ID NO: 20447 - DNA, 235 bp, Glycine max
  Clone ID: 700871903H1
tgtaaattaagagcatggctgcacaagctcctgtaatcatcatcttcctctaccttctcagcggaggctgcaagacaaagtcttggaccaagatcactccaatctccatttggcttctccagaaaagcctcctttcttgttaaggcagctgctaccccccctgtcaagcaaggatcagacagacctttgtggtttgcatcaaagcaaagtctttcttacttggatggcagccttc

SEQ ID NO: 20448 - DNA, 227 bp, Glycine max
  Clone ID: 700871904H1
ttaagatacggttaatgttgttgctgattgctggagtcgtcgtaggtctctccgtcgtgtcgtttgtagtgacaaaattccgtgctccaggctttaacgtcgagggcaaacacgtgttcattacaggcgggagctccggtttggggctggcattagccaaaaagtatgcgcaacagggagctaaggtgtcgattgtggcccgtagtctcgacaagctggaggaatcc

SEQ ID NO: 20449 - DNA, 230 bp, Glycine max
  Clone ID: 700871905H1
ggagtacaagagtgatatcttggggagagaggaattttacttggtgctgttcatggagttgtggaatccttgtttaggagatacactgataatggaatgaacgaagatctggcctataagaatactgttgagtctataacagggattatatctaaaaccatctcaactaaggttgtattttcatactcgtctagcattaaatttttgtctgttggactcccccatccctt

SEQ ID NO: 20450 - DNA, 230 bp, Glycine max
  Clone ID: 700871906H1
tcaatttctatctctcttatactctcactactctctttgctctttcttttctccactatggctgcacaagaaaacaacttccaagactacttgcctgtgatggccaacaagcttggtggggatggcctaattgatgaactgtgcaatgggttcgatcttttgaaggattctgataaaggggtcatcacttttgagagcctcaagaggaattcttacttgcttggtcttca

SEQ ID NO: 20451 - DNA, 250 bp, Glycine max
  Clone ID: 700871866H1
ggtgtaggagtgtaccaaagtcttccttgtgaagctgccagagagtagaaagttcattgtgcctaaaaacatgagggtgcttgcagttccgttgtgccaagttcatgaaaatcacaagacatatgggcaaattatatcaggggtcccacagctgctgtcaaaattctctttcaacatgatagaatcttgatacctgattgcaacctattttatcatccagggtgaagggactaaggctttgctcgttaga

SEQ ID NO: 20452 - DNA, 251 bp, Glycine max
  Clone ID: 700871822H1
ggaacgtgaaagtaaaacggacggtggcgatagaagcgtctctcatctccatcgtctcctcactcctctcttctccagcgttcattttttctcgcgcccaaatacaaaatcacatcacaacagggttccggcgaccatgtccgatgctccggcgagtccatgcggcggcggcggcggaggcagccacgagagcggcgagcacagtccccgctccaatttccgcgagcaggagccgttcctccccatcgcca

SEQ ID NO: 20453 - DNA, 244 bp, Glycine max
  Clone ID: 700871823H1
cacaagaactctccaaggatcctccttcccacgtgattctttggctggaaaaatccaagaggtttgaaatttgaaggcagggaagatggatcatttcaatgcaccaggaagaaaccatctctttgttccagggccggttaacattccggaccagatcatccgggccatgaacagaaacaatgaggactaccgttctccagcaattccagctatgacaaaaactttgcttgaggatgtcaagaag

SEQ ID NO: 20454 - DNA, 94 bp, Glycine max
  Clone ID: 700871824H1
gtgatgtctctgcattgcatgagtctcctttatctcttcatttctatgtacatttatcattgcctgattaaattttcaacttccactcaccaag

SEQ ID NO: 20455 - DNA, 251 bp, Glycine max
  Clone ID: 700871826H1
ctactccttaatttctctcttcacttatcatcatacttatatattatataacccaataattaaattaaatacatgttagcactttaacattcctttctctaacctcgttcccactctcatattttcggttctgctgatattcagctaaactaagtcaataagatgactcagggaaagatagttgaagctgcagaagctcataaaacacttgaggatttcgatcctccaaagaagcgcaaaaggaacaagta

SEQ ID NO: 20456 - DNA, 250 bp, Glycine max
  Clone ID: 700871827H1
tttagacccaccctttctcttctcttccctttcaacttcaactcaacaacccttctcttctcaaactctttcttgcctttctttttgttcatacttttatttttattgctacttactttttatttctatccaatcatccatggccgaggaaccccaaaaaccagcctccgctgaagaagtggtgcctgttcctgcggacacgccaccaactacccaatctgaagctgaagctgaagttgaagcaaatgca

SEQ ID NO: 20457 - DNA, 120 bp, Glycine max
  Clone ID: 700871828H1
acgaattttcatatccattcatatttttctcatcatggacttggccgcgaacttcaccgtttagacctcaccggcgtggtcattttggacgcacgaaagctctccgtactccgccacctt

SEQ ID NO: 20458 - DNA, 250 bp, Glycine max
  Clone ID: 700871829H1
gtaggtaatatcgatgaagctactgcgaaagctacgaacttagaaatggagatcaatttgtcgaaatgactttaaatctttgtgtactgacccccaatcgaattgtttgggattcggaagtgaaggaaatcattttatctactaatagcggacaaattggagtattaccaaatcatgcgcctattgccacagccgtagatataggtattttgagaatacgtcttcttaaagaccaatggttaacgatggc

SEQ ID NO: 20459 - DNA, 251 bp, Glycine max
  Clone ID: 700871830H1
gttactggacgttatgtgatggacattgcttgtgggggtcggcatagtgttgtgataacagattctggggcgcttcttacattcggctggggactgtatggccagtgcggacaagggaataatgctgatcagctaagaccaacttcagttccttctttattgggaactagagtggaaaaaattgctgctggactttggcatacattgtgtgtttctgtaaatggtcaaatttatgcatttggtgggaatca

SEQ ID NO: 20460 - DNA, 257 bp, Glycine max
  Clone ID: 700871832H1
ctgttcaagtagctgctcctaatcattctccaaacccaaactttcacgacagggacgtgtcagatttagttaaggtatttgcatcatgcatgtgtgaagataatatagatatggaaatctcccatgacatcaagatcaaggatgacaagctaggtgatgtaaaggaagagaagattaaggcagaagcggaactgaagcataaatcagttgagaaagagcatacaaaaagtaaggacgagaagattaaggtagaagcg

SEQ ID NO: 20461 - DNA, 255 bp, Glycine max
  Clone ID: 700871833H1
atcgacgaatgcttgcctattctacagttggaacacctgattatattgctccagaagttcttctgaagaaaggatatggcgtggaatgtgattggtggtctcttggagctataatgtatgaaatgcttgtggggtatccacccttttattcagatgaaccaatgttgacttgtagaaagatagtaacttggagaactactttaaaatttccagaagaagctaaacttgcagcagaggcaaaggatctcatttgta

SEQ ID NO: 20462 - DNA, 254 bp, Glycine max
  Clone ID: 700871834H1
atttatactggaacgaatggttatcttgattcattagaaattggacaggtaaggaaatttcttgttgagttacgtgcttacttaaacacgaataaacctcaattcaaagaaatcatatcttctaccaagacattcactggggaagcagaagtccttttgaaggaagctattcaagaacagatggaactctttttactacaggaacaggtagaaaaaaattgattaatcatttaataactttataatttcacttt

SEQ ID NO: 20463 - DNA, 252 bp, Glycine max
  Clone ID: 700871835H1
tgcaaatacggagtcccggaaggcaacagcagctgtgtcaactgccgttgatccaacgagaaagcgagaatcaaagtccgtaggcgactgagcggcatggcgtgtcggactttcgacaaggttgttcgtggactatgcatctttgcttatgcttccgaagcttctctcaatcaatttgcctccgtagtctgtagtctgtatgtccctcgataagctgaatttgctgcgcttcagccttggctcctcctctct

SEQ ID NO: 20464 - DNA, 218 bp, Glycine max
  unsure at all n locations
  Clone ID: 700871840H1
tatttttttagggttccatcccatctattctatctatntagataaaacacgaaatcccaatcttaatcgcaagcaattcctctctctgagagaagctctcgaaattcttctgatactcgtagaattttaatggcttgttcatcatccgattcaaaaaaaccagtgacgtcgctgttgttcttttccttcctaattccttaaccttccgattctctttc

SEQ ID NO: 20465 - DNA, 195 bp, Glycine max
  Clone ID: 700871841H1
atgcatacttgtttggttggtcccattttaaatgactacaggtctgtgggggtaatcgttccttctcaagaaggaaaagcgatcattgtgcagccctgatcgggtggtgaatcgcaaatggacctgcatttggttgtgtgctgatgaaggatttccttaaggcacttgcaaagcgcctcaagcacaacaatactg

SEQ ID NO: 20466 - DNA, 248 bp, Glycine max
  Clone ID: 700871842H1
tggcccgcgaaggatatgtgaaggaagatgatcgattccaacttaaaccaaaccgggtgaaccttccgttgggcaatcaatctactacccctaataatgctgtagttgaaatgcaacaatatggcgaagtcattcctggtcaatcatccaatgaagttgcaaaaccagctagtggcagtaatgcacctataaacctctctcagaatcttctaacaaacccaaggatgttgccacctggaagcccccaa

SEQ ID NO: 20467 - DNA, 80 bp, Glycine max
  Clone ID: 700871844H1
gtgatgtctctgcattgcatgagtctcctttatctcttcatttctatgtacatttatcattacctgattaaattttcaac

SEQ ID NO: 20468 - DNA, 248 bp, Glycine max
  unsure at all n locations
  Clone ID: 700871846H1
ggattgcaacgcaaagggagtgacacttcttgaagctgaaaccacaaagtcattgggtgattatggagatttttcaccttctgagtccatcaaggaagagcttgttccacaaattgattatatctgacccttagaggagcttcctttgttgtttgtgcaattgacaagattcaaagatggtgaaagctttgccattggagttgcctgctcccaaggnttggctgatggtcttagtgcaattcaattca

SEQ ID NO: 20469 - DNA, 254 bp, Glycine max
  Clone ID: 700871848H1
ctattgcacaatggatgcagatgcagctcctttgcacatagcaatgtatccatggtttgctatggggcacctcaccccatttctccaccttgccaacaagtcagccaaaaggggacacaaaatctccttcttcatacccagaagaacacaagccaagttagaagacctcaatcttcacccaaacctcatcacctttgtccccatcaatgttcctcacgttgatggtcctgcatatgatgcagaaaccacttcag

SEQ ID NO: 20470 - DNA, 213 bp, Glycine max
  Clone ID: 700871849H1
acgtcttttcatatccattcatatttttctcatcatggacttggccgcgaacttcaccgtttagacctcaccggcgtggtcattttggacgcacgaaagccctccgtactccgccaccttccgccacgcatcctcacttaaacaaacaccaatttaatctacacgaaccggttctcgggcccatcgaggcccaattccgcttcctcttccaca

SEQ ID NO: 20471 - DNA, 250 bp, Glycine max
  Clone ID: 700871850H1
ggaagatgtaaaagtggactcaaactcaagatttccatttgtttaaactattccagtcacctgatattctagtactttaaagtaaatcatttacatatgatcattattttcaggagctcagcagttgatggactgttaccccaagagcagtgacaagctaacattatagaggtggttttttattgataaaagagttgggtgacagtggacatctgataattatcattctgattggtactctatactcctt

SEQ ID NO: 20472 - DNA, 244 bp, Glycine max
  Clone ID: 700871853H1
aaaatgtaagacagtggcggtgacttgttctggggtgtctgcaaggcaaagaagaatgaataccaagaggaagactgcgattaaaacttgtggtgctatgcagctgaagtccaaaatcagtccagagctgcttcaacaccgtttgaagggctatgtgaaaggcatagtgagtgaggaattgctctctcatgcagaagttgtaaacctatcagagagaataaaagttgggctttccttagaggag

SEQ ID NO: 20473 - DNA, 246 bp, Glycine max
  Clone ID: 700871857H1
ctggacttaaacagtataacttgggataacaacatggacggtttttccattgctcctgcttttatggacaagcttgttgttcacatcaccaagaacttcatgaccctgcctaacatcaaggttcctctcattcttggtatttggggaggcaaaggtcaaggaaaatccttccaatgcgagctcgtctttgccaagatgggaatcaaccccatcatgatgagtgctggagagttggaaagtggaaat

SEQ ID NO: 20474 - DNA, 246 bp, Glycine max
  Clone ID: 700871858H1
ggcgatgtgaattccttggttgcacaaagagtgcagaaggacgtacagatttctgtattgcccatggtggtggccggagatgcagtcatgaaggttgtacccgggctgccagagggaaatctggattatgcatccggcatggtgggggcaagagatgccagagagaaaattgtaccaagagtgcggaaggcctatcaggcctttgcatctcacatggtggagggcgtcgatgccaagttcctggat

SEQ ID NO: 20475 - DNA, 217 bp, Glycine max
  unsure at all n locations
  Clone ID: 700871860H1
acagttggtattcctgagatatcaggtatagcattggcctgtgctatgaatagttcttttagggggcgtgccagttctgatatttacaccatctgctctcaagactgtgaattatggaatcttcgcatgcataaatgctatgactatgntatttaatcctaacccgtgtactgttgcatggagtttggaatttctgaagcgtaccggatttcattgt

SEQ ID NO: 20476 - DNA, 251 bp, Glycine max
  Clone ID: 700871863H1
aaaaaaagagattaggatttggtgttgcgcagcgcaggagaatatggccatggctttgctgagcctcagcaccattctcacaccgccttcttcttcttcttcttcgttttcttctccaaaacctacttcttcctccatcgttcggtttcgccctctcactccccttcctcgctttcggaggcatctcgttcgtatggctcccgatgaggagaagatgactcgtcgctcccctctcgatttccccatcgagt

SEQ ID NO: 20477 - DNA, 168 bp, Glycine max
  Clone ID: 700871864H1
cgtcacgcctttgcgcagggtcgcccgtgggcggagctcatcgaccggagctccatgtcccgacctgacaccctcgccgaagcatactctcggatccgcaagaactacggctacttccgcgtccattatctaaccctaatcgcgctcgcgctggccgtctcgctcatc

SEQ ID NO: 20478 - DNA, 251 bp, Glycine max
  Clone ID: 700871865H1
attgactttgactacaaggagtatgcgaggcagagatttcagcaatactggttgaagaagcctactttattggactcaccaagtatcgtttcccaagatgggattgccaatggtgtgaaccattgacatggatgcttcttatgtatttagcatgttcagcttggtatgtgttgactaatatatagataggcatgatgtgatgcataaaatttgtaaataatatataactaaaaatgtgtgatttgagaatt

SEQ ID NO: 20479 - DNA, 251 bp, Glycine max
  Clone ID: 700871821H1
cacaaggcagaaagcaagctcatcctagagttttaaaaatggcagcagcctcctccatggctctctcttccccatccttggctggcaaggccgtgaagctgggcccatcagcccccgaagtcgggagggtcagcatgaggaagaccgtcaccaagcaggcctcctccggaagcccatggtacggcccagaccgcgtcaagtacttgggcccattctctggcgagcccccgtcctacctcactggcgagttc

SEQ ID NO: 20480 - DNA, 68 bp, Glycine max
  Clone ID: 700871770H1
cttctccaaagagaaagaacagcaagcaatcgttacccattagcctatttcactttccacacaacata

SEQ ID NO: 20481 - DNA, 215 bp, Glycine max
  Clone ID: 700871771H1
cacactatggatgtttggtcatggatatgtgagctccccaactcggtggaggggaccgagtcccactcgccacccatgaagttcgaaatcgcgagtgagaagaacgacgacaagctggacaactcaactcgttccattcacctgaaagctgagcgaacctccggctcagactcggaagctgcggtgatcttcaccgtatgcttgcaaggctttca

SEQ ID NO: 20482 - DNA, 214 bp, Glycine max
  Clone ID: 700871772H1
atggtgccaaggtcttgatggtcttgcgtctcgctcagctgcatactaccagcaaggtgcccgtttcgccaaatggcgtactgttgtgagcatccccaacggtccctctgctctggcagtgaaggaagctgcctggggtctagctcgctatgctgcaatttcacaggagaacgggttggtcccaattgtggagccagagatcttgcttgatggt

SEQ ID NO: 20483 - DNA, 215 bp, Glycine max
  Clone ID: 700871773H1
ctagaagcaggaagagaagcgaaacaaacaaacaacaaaataatcaattgagccacttaccatcagatttagatctcccaacagagagtttctcaaaattgccaagtacccttttcaggatcaaggaagagaatcaagaaccaccaaaaggtgttgttctttgttgtagttgtttgtaactgtagcaacatgaagatggttagaaagttggttgt

SEQ ID NO: 20484 - DNA, 212 bp, Glycine max
  Clone ID: 700871774H1
gtaaaaaaaaaccaagtgatttcttctaattacaacacgtataaaaaagaattattggatatcatagataatctctttatcaagaattatatatcggaagatgcgattctagatatggaaaaaaatatgtatagaaagtattttgattggatgggaatcaatagagaaatactaaatcgttccatatcgaatccagaattttggttcttttc

SEQ ID NO: 20485 - DNA, 211 bp, Glycine max
  Clone ID: 700871775H1
tatggcatctgcaacacgtttagtgcactgcgagctgcggtcggcgaggcccgcggttcgggcgagggaaccggccggtccggttcaggttacgatcccgaaacccaaagcggcggaggcggaaggcgcgaacatcgttttgcagccgcggttgtgcactctgagatcctacggttcggatcgagcgggggttctgatcaaggcccgcaag

SEQ ID NO: 20486 - DNA, 211 bp, Glycine max
  Clone ID: 700871776H1
caaaaaaaaaaaagtcatggcagcgagtgacggttgcagcagcttcttaacattgtcgtgtgcaggtgcagtgcaaaatcaacatgtatcacaccctacaacgtttttgggagttcctaaaaacaatcagagaaaaaggaaaacaccgcacaggttagttgtggttgcggtgactcaaggctctgctgaatcaagcaagtccgatgaaaaa

SEQ ID NO: 20487 - DNA, 213 bp, Glycine max
  unsure at all n locations
  Clone ID: 700871778H1
cttgaaggtgctactgaagttatatgttcacgcactccataaaatcgacaatattnaaaacagatctatcattctatgtttggtgtttatcttgagcatgagtttcaaacaaacaccagccccggcgatcatcaaaagctcttgcttgcatatataagcacacctcgtcatgagggccccgaggttaatagagaaattgctcagaaggatgca

SEQ ID NO: 20488 - DNA, 214 bp, Glycine max
  Clone ID: 700871779H1
gattccacaacagtgggagaagaatccaaaaagagagagtggaaaagatggcgcggttgatcacagtggtgtgctgcgcggtggcggtgctattatgcgccgcggccggtgcgtcgtgggtggaggaggcggcgaacccgatacgaatggtgtctggcgtggaggcggaggtggttcgggtgatcggggagtgccggcgtgcgttgaagtttgc

SEQ ID NO: 20489 - DNA, 70 bp, Glycine max
  Clone ID: 700871781H1
ctctgatgctcttgtcaaaaaaactagctgaacatggcttcaaagtcacttttgtcaacacagatttcaa

SEQ ID NO: 20490 - DNA, 212 bp, Glycine max
  Clone ID: 700871788H1
ctcgagcgtggctgaggcctctgcacaagcttgtgtctctattccttccaatccttagagttctctgcaaaggggtttcagtgcataataattcctgtaatgtgcaccagtaaagaccaaagtatgattattgttacattatgctatatgattgtacttgtatatacatattttgtcccgcctttgtaaatacaattgggacactactagga

SEQ ID NO: 20491 - DNA, 209 bp, Glycine max
  Clone ID: 700871789H1
aagaactatgagctcaaggaggggctgcttcgtgctgtcgctggcaccggcatgtgggagtgtgtggacttcttccctgtgtccaaggagaatgagaatggattggatacttctattaatggggctgaggtgaagcatgtgatgaaggtgagcctggatgatgatagacatgattactattcaattgggacttatgatgagaagaatgt

SEQ ID NO: 20492 - DNA, 210 bp, Glycine max
  Clone ID: 700871790H1
ggaagagtctgagtcgctcgtcagtcgctgcaacgggatgatgattgtagccaaatgcaaagccacgtggaccgcccatgccagcgcataggacagcctcgtattacaaaaaagggtttgccatagcaccgcgccggtaaagtgctggaaagggaatcgagtggatgcgattgcggcgagggcaaggttgaggtctagaggcgaggaatc

SEQ ID NO: 20493 - DNA, 102 bp, Glycine max
  Clone ID: 700871791H1
cagtgacaaaactgggactctcaccttaaataagttgagtgttgacaggaacttgattgaggtgtttgctaagggtgttgagaaagagtatgttatccttct

SEQ ID NO: 20494 - DNA, 210 bp, Glycine max
  Clone ID: 700871792H1
atgaaaacgtaagtaatttcttacctgagataaattctgaattcatctttccctatggtgatgaagcagaatattgcaatagttcctcttttcccaactccgcgttgaatatatcagacaaagggaaaagcaagatggtttgacgtaagattcaaatgggtcaccctcacactgcatgcagctaaaggcaaaactttttcgccgtcagta

SEQ ID NO: 20495 - DNA, 213 bp, Glycine max
  Clone ID: 700871794H1
atagtagagaagcaaggtgctgagtaccaagagatagctaaaatgggacttgggactctgccactgaccccttcttacagcggtttctcttcaaactcaggacttatacatgacaccaccaatcacagaagggtgcatagaagcatgaaattcagagtttcagcaaaacaagagaagcaagaagagaagaaaaagcaatctttgttcagcagt

SEQ ID NO: 20496 - DNA, 257 bp, Glycine max
  Clone ID: 700871802H1
caacattgaaggggtataaagtcatagtggctatgccagcttctgtgagtcttgagagaaaaattgtacttcgagcctttggagctgaagtctatctcactgaccctgccacaggaaccgatgcagttcttaggaaggccgaggagatagtgaataacacgcccggaagttacatgctccgccagatagataatcctgctaatccaaaaattcattacgagaccactggtcctgagatttggagagactccggaggg

SEQ ID NO: 20497 - DNA, 254 bp, Glycine max
  Clone ID: 700871804H1
aacccgtctttgccagcagctattggctctggttctctgtgtagcacaaagcccaacaatgtcaactgtgtgccctctgcagcaagtatggccattgggaagcaatctcaaaaacacttgccaattgtaaaccaaaatgcttcacaagagaaagggtgggccgtgaccagcaatcctagtcttcatgctgccaaatgttctaataattccaacccaatggattctcctcatagggtgcagcttgtgctccagca

SEQ ID NO: 20498 - DNA, 254 bp, Glycine max
  Clone ID: 700871805H1
cttataccagaggtggatttataaagtggacaagaaacgtgttaatgaatttggttttggaggcgaggatgatcaggttgtggcagagacagacgccacaaaggaagaagagaacactacaacggaagaagagaagaaaactaattgatttggttttctctaaacaatttgagaaaattttacagtagataccaaatactgtagaattctacggggattggtttgtttatctcccccttttgttacacatttgc

SEQ ID NO: 20499 - DNA, 251 bp, Glycine max
  Clone ID: 700871806H1
attgcctattccgcaatatggcggaaattgcttcgattgagctgaacaagtttgtgctcttttgtttgttggtgctaatacaagtggcagtatctgaaatcatttttgaagagcgttttgatgatggatggcgaggtaggtgggtgaagtcagactggaaaagcagtgaaggcaaagcaggttcattcaagcacacagctggaaaatgggccagtgatccagatgataaaggtattcaaacatccagtgat

SEQ ID NO: 20500 - DNA, 123 bp, Glycine max
  Clone ID: 700871807H1
cagcagccttggcaagaacgccgttctgcggaatatatgtcccatgctcctttaggctccttaaattccgtgggtggcgtactacagagattaatgcagtcaattatgtatctcctagaagtt

SEQ ID NO: 20501 - DNA, 96 bp, Glycine max
  Clone ID: 700871808H1
tgcctggctaaggaaaaacaaaaccggaagcgctcactaggcagccatgccaatttggcagttgtgtccaaacatccattccgtgccacacatcat

SEQ ID NO: 20502 - DNA, 279 bp, Glycine max
  Clone ID: 700871810H1
tcgcatgctcgcgtatgcggctcgagcggaagcatacacagatggctcgtacgaagcaaaccgctcgtaagtccacaggaggaaaggctcctaggaagcagcttgcaaccaaggctgcacgtaagtctgcaccaactactggtggtgtgaagaagccccaccgttatcgtcctggtaccgttgctcttcgtgagattaggaaataccagaagagtaccgagcttttgatccggaagctccccttccagaggctggttcgtgaaattgctcaggacttca

SEQ ID NO: 20503 - DNA, 253 bp, Glycine max
  Clone ID: 700871811H1
tgcagactgggcaagaaaccgattttgtattagtttcatgttctggactaggaattgagccttccaggcgggagcaggttcttaaagccaagagggctggtgaagattccttaagaagatctggccttggatacacaatagtccgtcctggtccattgcaggtaaagtttctattgctgctcctaggtagaacatgtgattgatttagttgcagaaattagcatttctgtggcacctggatacaagggagcca

SEQ ID NO: 20504 - DNA, 253 bp, Glycine max
  Clone ID: 700871813H1
cgtgaatgcgtataaaaggtaaataaagaaattagcgtcaaaatgttgggtgtgttcagcagctccatagtgtcgccgccggacgagctcgtcgctgccggcctccgtactccgtcgccgaagatgacggcggcggcgctgcggaagcggttcgaggagaagaacccctccgccgtgtcggtggaggtcggagagcatgtccagctcgcttatacccaccacaacgagtcgccgtttcagcccagatcctttg

SEQ ID NO: 20505 - DNA, 252 bp, Glycine max
  Clone ID: 700871814H1
caactatggtttatcagcttatcactattctgagggaaaatttatctgttcttgtcaaaagaacatgatataataactataaaaaaaatgatataagaattcacaaaaatgtttgatctgttatttttatagttattgcaatatatttttattctcttacatccacataggatggaactataatacggggacaaaatgacatttctcatccaaccagtggaacaatggagcttattaagaaggaaagctttt

SEQ ID NO: 20506 - DNA, 255 bp, Glycine max
  Clone ID: 700871815H1
ctccttggtgagtttttcatgcaggagtagtagtggtggtgaaagagcacaaaagagattttctggaatcagttttgctagtggtacttctgctttttcaagtgcagtggcagctactgagacttcaagatcttcagaggagagggtctatgaagtggttctgaagcaagcagctttggtaaaagaacacaaaaggggtacaaaaatagctttggatttggacaaagatgttgaggctgatttcaacaatgtgga

SEQ ID NO: 20507 - DNA, 264 bp, Glycine max
  Clone ID: 700871816H1
cggctcgaggtaatcacacaggagcttcatctgaaagctctggatacatggcttggggtgatagcgctaattcaagttcttctctagttaattggggtccttcctgcaagagaaacgctcttgaaggtagttctaggcaactgtgttctggaggaagctcaagcactcttgtacaatccggaaatggttgctggcctactgatcctgttgatcttaatgcttccagcgacttaactgattctacacctatagaagatattcctg

SEQ ID NO: 20508 - DNA, 200 bp, Glycine max
  Clone ID: 700871818H1
gtcaaaagcacccttgggggtagttatggaatcccaaaagtacactataaatgaggacaaggagaatattatgggatggttatggacatagttgctccaagtttgtggagtcacaggaatacctcaagccagatgatgtcttctgaaatggtctcatgtgtagcggttgagtccttatcaatacttgagcagatgcactc

SEQ ID NO: 20509 - DNA, 251 bp, Glycine max
  Clone ID: 700871820H1
aactcacgaacatttgatcaaatggctgactcaggaccggccgatcgtggaggtgctggaagaggttttggaagaggacgagagagaggaagaggaggacgcggaggtcgtggcggcgacagaggaggacgcggacgcggaggagctggcggaggccgtggtggcagacgcggagacaaggaagagggaggagcctgggtgcccgtcaccagactcggccgtctcgttgccgccggtcacatcaacaagtt

SEQ ID NO: 20510 - DNA, 76 bp, Glycine max
  Clone ID: 700871768H1
ctcgagaaaaccctgaagaaagacacagccattgtttacttttcattgattgagccaaagctttgtactgtctgcg

SEQ ID NO: 20511 - DNA, 221 bp, Glycine max
  unsure at all n locations
  Clone ID: 700871719H1
cattatcatccccgaagctgggaacaacactcctcaaaatcaaatctctgccatattatatatcagatgttgcactctcagtgccaccaccaccttctcttcccactcacactcgcaccccacaatcttaatncccctctctccattcttcctcctcttcaccacaaacccaccattctccactctgtttcggcttcagccattcctccatgggccgcgca

SEQ ID NO: 20512 - DNA, 222 bp, Glycine max
  Clone ID: 700871720H1
cggattgcaacgcaaagggagtgacacttcttgaagctgaaaccacaaagtcattgggtgattatggagatttttcaccttctgagtccatcaaggaagagcttgttccacaaattgattataataaacccttagaggagcttcctttgttgtttgtgcaattgacaagattcaaagatggtgaaagctttgccattggagttgcctgctcccatacgttgg

SEQ ID NO: 20513 - DNA, 220 bp, Glycine max
  Clone ID: 700871721H1
cctttctctttctctccgacctagcgagaccgagcgatccgatcctaaccccgcgatgctccgccgcgcaaccacctccctcatctccggcgcctcccgccgccgcctctccaccgacgtgccggcgccgcggtggcggattccgtcttcgcggaggcgtggaagaaagtgagccccaacatcgacccgccgaagacgccgctggcgtacatgaagcccc

SEQ ID NO: 20514 - DNA, 218 bp, Glycine max
  Clone ID: 700871722H1
catttgagtggctggagaggcgggataaaagtgtatggtatgggggcgtggtgaccgagggctcgaaaggaggaaacttttggctacagaaagtagtttctttagtcgggtttctttcaaaaaatggtgcagagtctctgtttgatggcttctcatggttaccctcctggccttgtcttgcatccacaagtactgggcttgccctgcagtaccatgaa

SEQ ID NO: 20515 - DNA, 211 bp, Glycine max
  Clone ID: 700871725H1
cccggttatcatggcgcaggcataccgcttacttgtggctgaaatgtatgtccaaggctgggattatccattacacttgggtgttactgaagctggaggaggtgaggatgacaggatgaagtctgcaattggcattggaactcttcttcaggatggattgggtgatacaattagggtgtctcgcacagaaccaccagaagaggagatagat

SEQ ID NO: 20516 - DNA, 58 bp, Glycine max
  Clone ID: 700871726H1
tctcacttgactcgattgcaagtgatccacgacacactgaacagatcacaaaagcttc

SEQ ID NO: 20517 - DNA, 218 bp, Glycine max
  Clone ID: 700871727H1
ccactccaaaaataacccaaactctcttttaaaaaaaaacccgaacacatagaaacagagaaagtgtgagtatcgccgccgtagccctaccctctcttcatattattctattgcctttctttaactccctcactttttcagttttgaagcgcttccagtggcgtatttacggttatacccttcttgttatgatagcttccaatcggcgtcagcacaga

SEQ ID NO: 20518 - DNA, 215 bp, Glycine max
  Clone ID: 700871728H1
caatttttgctgtaatgacaggaagaagactatggtgctgggtatcttgttcagccagttggacagtctgatgctctcaatgctggaggagctgatgtgcatggtggaaatgatgacgatggtgaagaggaggatgaagttgatgacgacgacgatgatcaggtgttgcctcctcctgactcttcccacaagaggaagagggatgatgaagagga

SEQ ID NO: 20519 - DNA, 220 bp, Glycine max
  Clone ID: 700871730H1
ctcaaaccatgttgctcatgtctagtgtctctagcagttattccgtggatttgaagaaagaccttttcctccaattgcagagtcaaagtttaaggcctaagttctctcagctctcattcaacccacttccatcatcaacttcttccttttcttcaccccgtacattcacaactctggccctcttcaaatctaagaccaaagccgctcctgctaagactaa

SEQ ID NO: 20520 - DNA, 219 bp, Glycine max
  Clone ID: 700871732H1
cttgtttcttctctgcaccctttgggatctcttgcatagaacaaccccagaagaaggaaaaaaattaaaaataaataaaaatcaacccttttttattttggggcttgttggtgattctgttgtacagaagtgttcgttagttatacatttgttcaagattgttgtatagattgattcattattttaacgtactttggagcattgcatgagggattgccc

SEQ ID NO: 20521 - DNA, 214 bp, Glycine max
  unsure at all n locations
  Clone ID: 700871734H1
gaaaaccggctcacatggtagatgaggagtacatagcaaaacttgaaaagggcattgcactcatgaaagcactccctgatgatgacccacgtaattccatacaacatgcgaaataaaaaagngcttanggnaacggggcctatcacctaccccatccctttcagagcacaagactgcaacgttcacaggtcttggtttttctgtcctttccacc

SEQ ID NO: 20522 - DNA, 216 bp, Glycine max
  Clone ID: 700871736H1
caaatgatgtggggctcacttcctatttgatgagtttctcttattattttgtgattcttaataaattttaatcaatgacaaagagtgtatttgaaagaacatgttcctagtttatactataaacatgtacaagctagggttatcggttgtatagacatttctgatctctttgtatgataatcttgttgccagtgtttagtgggaaatatgaatttt

SEQ ID NO: 20523 - DNA, 217 bp, Glycine max
  Clone ID: 700871737H1
ctcaaggcaaccagttaggatctactttggtgaatgacttacaagagcaggaagaaaagcttaaacaatatatggagcaacttgaaaatgcggaggctgcaagggattcattgctttctcagcttaagcatgcacttcaggaacaagaatcaaggcaagagctcgttcacacccagttgctagttgcacgaagccagatcaagaaagtggttggtat

SEQ ID NO: 20524 - DNA, 218 bp, Glycine max
  Clone ID: 700871740H1
cttaacactaataacagcaaactaaaggtgaagtttgccagaaacaagatgggaaggaaccattttcagcagcaacactgtgctgatgggagcatgtggatggagagtcagggtcagcaacagagctatgccttccaagaagagtcttggagccctgataacaactatggccacaaccacaagcaattcccaggcatgcacatgaacatgaacaacaa

SEQ ID NO: 20525 - DNA, 181 bp, Glycine max
  Clone ID: 700871741H1
agtgcctgcaatgctgcaggcactgtcacggaagggccaaaatcccctcccatgacatctaacgccagggttacacgtgtcaaggtatcgtcgccgcccggtttggtctttccccagttgcctggggaaaatcctcactaagcttcatcacgcagatgcgtgattacttagcgatgacctt

SEQ ID NO: 20526 - DNA, 214 bp, Glycine max
  Clone ID: 700871744H1
gtaagctcccaagcagtgggaggaggctcgggactctgaccgcgtgcctgttgaagaatgagccggcgactcataggcagtggcttggttaagggaaaccaccggagccgtagcgaaagcgagtcttcacagggcaattgtcactgcttatggacccgaacctgggtgatctatccatgaccaggatgaagcttgggtgaaactaagtggaggt

SEQ ID NO: 20527 - DNA, 215 bp, Glycine max
  Clone ID: 700871745H1
ggatggggcagttgaagaggaagaagagactgggtgttggtttaggttgaggttcattgggagctgcatttcttcaagatccaaagttgatagctcagttagtggcaccagcactaattatgctgaaagtaaatcaactattgatacaagtagagatcaaccaacactccgagtagtctcttcgacaaccactagtaatgccgaaagcaattcat

SEQ ID NO: 20528 - DNA, 217 bp, Glycine max
  Clone ID: 700871746H1
cagaaacaatgtcttgctccaatctcacaatgttggtgtcctcaaaaccttccctttccgatccctccaatctctccttccgctctgtcctcaacccttttcagctcccttcacaaaacccaacttcttgcactccttcacgctcctcaaccacccaaattcagtgtggtctgagagaactcagaacccgcattgattccgtgaagaacactcagaa

SEQ ID NO: 20529 - DNA, 217 bp, Glycine max
  Clone ID: 700871747H1
cagctgacgtctatggaagtaggatcacagtttcctctcagttgtatgcccagtaacatatctgaggtgcagtcttcacctgctgttttgggtttctgtagaagtcaggggatggagacagaaagcagtttattgaatcatgagctgaatgttatgggggctgatactaggaacatgggggagatagatatgatgtcaactgttttagatgaggcag

SEQ ID NO: 20530 - DNA, 220 bp, Glycine max
  Clone ID: 700871749H1
ggtggtaatggcagcgtcactacaagcagcagctactttcatgcaacccaccaagttgagcaggagcaacactttgcagcaaaagtctactcagtccatttccaaggcttttggtttggaacctgttggagctataaaggtcacatgctcccttcaggctgatcttaaggacttggctcacaagtgtgttgatgctaccaaaattgcaggattcgccctt

SEQ ID NO: 20531 - DNA, 217 bp, Glycine max
  Clone ID: 700871750H1
cgctttgggatgcggaggagcgaacaggctcgaacgaatgaatgtgagaggagcgaaaaaagcccagctccctaacctaatgcggcaccgggttcggaccgcagggaaccgtagcatgggaggatgtctaatccttttgcagccgcaaggctggctaatcgtacgcagctggctcgaatacccctggttctggaaggcacatgagtccgaacgctat

SEQ ID NO: 20532 - DNA, 216 bp, Glycine max
  Clone ID: 700871751H1
gttgtactcttatccattctatcccatatatgtaaggacctgcgtagaaccactttccagcaatattgcacctttttgcccaaagccatggctgaagcaattatgggtttcacccctttcaaatcacacactcttagctcatgtctacaaacaaacaagtttcaagtgaaccagtcttcaatattgccaaagcaacattcaaactctagtcttatc

SEQ ID NO: 20533 - DNA, 210 bp, Glycine max
  Clone ID: 700871754H1
ttcagctgccacaattgcagcagcagttgatgctgtgtgctcaatggagtggtattggcttctggctttgaaaaatcagaaaaataatcacggaatacactcaacacggatatggaaatggaaaggatttcttatccagtattcagttgctggtgaagatggtcctgctattcttcttgtgcatggttttggtgccttttgggagcatta

SEQ ID NO: 20534 - DNA, 215 bp, Glycine max
  Clone ID: 700871757H1
gtgatcaaatccacaagtgagtacgaaatccgtaagtatgcaccatcagtagtggctgaagtcacatatgacccttcacagttcaagggaaacaaagatggtggctttatgattttcgccaattacattggcgctgtggggaagccccagaacaccaagcctgaaaagattgccatgactgcaccggtcataacacaggacagtgttggtggtgg

SEQ ID NO: 20535 - DNA, 214 bp, Glycine max
  Clone ID: 700871761H1
cacactatggatgtttggtcatggatatgtgagctccccaactcggtggaggggaccgagtcccactcgccacccatgaagttcgaaatcgcgagtgagaagaacgacgacaagctggacaacccaactcgttccattcacctgaaagctgagcgaacctccggctcagactcggaagctgcggtgatcttcaccgtatgcttgcaaagctttc

SEQ ID NO: 20536 - DNA, 218 bp, Glycine max
  Clone ID: 700871763H1
agtgacatttgccaagacaagccagcattcatattttgtgttgaagacagagcactcttctgtcaggattgtgatgaaccaattcattcagccggaagcctttccgcgaaccaccagcgcttccttgctactggtatccgagtggcctcgagttctaattgcaccaaagacaatgaaaaaagtcactcggagcctcctaataggagtgcacaacaagt

SEQ ID NO: 20537 - DNA, 215 bp, Glycine max
  Clone ID: 700871764H1
gtgagcaataagtttgagctagctggaatatgtggatatggagcagccttgttttgtggaactgggtgtttacatcgaagagaaagtctttcggtagactacttgaaagattacaaagcaaaatgggacagcaagccaaaaagaaacgataatagaacaattgatgaattgaatgaagcatccaaggttcttgccacttgcacctatgatgagag

SEQ ID NO: 20538 - DNA, 176 bp, Glycine max
  Clone ID: 700871766H1
attctttccaggcttcaacaagagccactttcctagtttttcactccttctcccagtctcggtgtgcccttcttctggggcattcgtgttgcccttcttcagctccacctccacacccgctcttggcccgagaagcttcactgggatcactatggtgggtgtgtgagagagggatt

SEQ ID NO: 20539 - DNA, 227 bp, Glycine max
  Clone ID: 700871767H1
gcaaaaccctgcagcccatgctgcagcgacgttttgctgctacattttaggccatactgcaaatggcagacaacttgctccagattactcccgtgtagcactccagattttcccatcaatgacaaattggtcacgcctccaagtgctgacagctattgcagctgctacagtagctgctgcaactgcatggtgggctgcccatggactgcttcctttatgtggtccac

SEQ ID NO: 20540 - DNA, 220 bp, Glycine max
  Clone ID: 700871717H1
cttgcccctttatctgaagggaggatagatgaagatgggaagttgcagtgttcttatcatgggtggtcttttgatgggtgtggatcttgtgttaagattcctcaggcttcatctgaaggccccgaagcacgtgctatgggatctcctacagcatgtgccactaggttccctaccttggtgtcccagggtttgctctttgtatggcctgatgagaatggtt

SEQ ID NO: 20541 - DNA, 181 bp, Glycine max
  Clone ID: 700871654H1
cagaagttggtgttactgtttattgttgttagtgtttgtgttgagtctctcagctctcataagaggtccctctttggagtcccatggttgctctctcttccgcggagttcaaccacggctcgaacggcctctttctctctcttcccttcctctctcctcagacccgcccttttccacacaa

SEQ ID NO: 20542 - DNA, 225 bp, Glycine max
  Clone ID: 700871656H1
agtataggcagttcctacaggaaaaaatacaaattcatgcgcagacttatgcaggatggaatcaggagcccacgaaattaactccatggagaaatcatcatgggcctgcagaaaatactacagatccttctcaagcttcacaaaatgggtctgttgatgagaaaagtaacaatgtctctccattgttgcccaaaaatgtacagaacctgatagagtctgacttct

SEQ ID NO: 20543 - DNA, 224 bp, Glycine max
  unsure at all n locations
  Clone ID: 700871657H1
cgtcgattcccctaaacgtgttcgagatttaatcacacacactaatcacacataacaccaccggagaaggaccttccatcaacccataactaatncgtaaattatttcatcgattctctcccttctctttctctctgcgacaccagatgatggagacgacggcgaaggagaacgctgtcgttgcgccaatcgcggcgttgttgttggtggtgctactcgcggcg

SEQ ID NO: 20544 - DNA, 227 bp, Glycine max
  Clone ID: 700871658H1
aaaatatggtccatatgagaatcttcctccattttcatacttgccaagagttgttcactttgagaataaccaacccttcgctgttgctaaagagttggtgcgagagatcgaaatttcccattggggcaatatacagatcacagagcattacagtattatccatgctggtgctcagagcaaaggagaattttctaggcttgactatcagaccaggcaatttttaagag

SEQ ID NO: 20545 - DNA, 231 bp, Glycine max
  Clone ID: 700871662H1
ctcactcatcaatggcatcaacaatatcagcaatggccatgatcaacgccaaatgcgtcaacccaaagttccccaaccccaccaagctcgtaccatcaaaaccttcccttcaggtcaaccttccaaagggcctaatagcctcacccgaaaacaccaaactttccactgcgacacaatcgcaggagcaatattcacaaccctcggaacctgcgacgccgctttcgccgttca

SEQ ID NO: 20546 - DNA, 226 bp, Glycine max
  Clone ID: 700871663H1
gtttgtggcctctctctctctctcagccgtcgcagtctctgccagacactcgctcatccaaaattatgatcatttctgtgccgtagattcgccggtaacacgagatctcaacttctcgcgccgttttcttttccccctttaaaaaaagtacaagttcaggttaagttagggttccatggcttcggagacgaaggtcgtgaatctggctgaggaagccaagctcgcc

SEQ ID NO: 20547 - DNA, 224 bp, Glycine max
  Clone ID: 700871668H1
tcgctttgctagtcctctctctctctcatacgcatcaatttccaaccatgcgggactacaaacaagaacaggacgtggaaattgaagcattagaagctatacttatggatgagttcaaagaaatacattctggtgaaagcggcctaagtacttccaatcgatgcttccaaataaaggttgttgcgcaggatgacgatgcagatgggccaataactaatccagct

SEQ ID NO: 20548 - DNA, 221 bp, Glycine max
  Clone ID: 700871671H1
ctcgaagtgatccactccaggtgggccatgctcggagccttgggctgcgtcttcccggagttgctgtcccgcaacggggtgaagttcggagaagccgtgtggttcaaggccgggtcccagatcttcagcgagggtgggctcgactacttgggcaacccaagcctgatccacgcccagagcatcatctccatctgggccacacaagttatcctaatgggtgc

SEQ ID NO: 20549 - DNA, 109 bp, Glycine max
  Clone ID: 700871672H1
gaagacctcagcttgaccaccctctctctcctaaggtgaccgccgaaccactccagaatggcaccgccgtaaccactcgtgccggacaatgtctccgccacacaacata

SEQ ID NO: 20550 - DNA, 222 bp, Glycine max
  Clone ID: 700871674H1
aggacacagcacttccttcacctgaatggtcctcagatcacatggctctcttagctgagtttcgctgctgcaagaataaatctaggcgttgacagttaaggtcactttcagtgatacataaagaaaaagtctgaaagaagcatttggttggtaagttttttgtaaaaatggtagatcatgcctgtctttttcaggtatctccatgtggagtcattgcaatga

SEQ ID NO: 20551 - DNA, 237 bp, Glycine max
  Clone ID: 700871680H1
cggaactcggctcgagtgggaacacgtcctttagaaaagttaagagtcgctttctcactacacaaaactaacacaaatcacatggaaagggtcaaagggcatatacatatgaaaggaccacaatgcacctccctaagaataactttagaaaggtaacaatgacccaaaatattagaccccaatttgcatcttaactaactaacaacataaaacatttatatattatgtgaatcatga

SEQ ID NO: 20552 - DNA, 225 bp, Glycine max
  Clone ID: 700871682H1
gtggattactccgacccgcctgagagttcttgtaattttggattttctgaggaagatcacgccctttggacctgggcatactaagttttcttccatgttcatgtgtgtgtttgtgtcatatgtttttttagtaattagtatttagtatttgcactttttgtccaggcttcaaaaatggctatagctttagctttatcaggaaagaaatgtttgttttctttttgc

SEQ ID NO: 20553 - DNA, 223 bp, Glycine max
  unsure at all n locations
  Clone ID: 700871683H1
tattttctcaacacaacatccgagttgagcnncatatctgtatctgtanatatacctatacctatacctatatggtatccgcatttccgaaaggatatatcttatttagggtttttgtgactgtgctccacaaccgagtcgccatggcgtcgcaggagagtatcgaaaagatgcaggcacggcagaattaccggaatttatggcacaccgatctcatgagatc

SEQ ID NO: 20554 - DNA, 220 bp, Glycine max
  Clone ID: 700871685H1
accagattgagacaaagaatagatcctcaatacaatgaggttcaggctcagatggaaacaaatttgtttgaattgtctcttgatgatgttgaaactcctaaaggttccatgttggatcttaaagtttctcaatctaaaattgcacttcccaaaaacacagttggaggaaccattctgcgtagtgatctattggcaaattttttgacagagggcaattttg

SEQ ID NO: 20555 - DNA, 217 bp, Glycine max
  unsure at all n locations
  Clone ID: 700871686H1
gagaaaagcagcatagtgagatactacgtatactacgtagtactacacatttcatttgcctcttgtagtagccatggttttccaaacaaacattaatagacacttcgtattgtttcctctcatggctcaaggccacatgatccccatgatggacattgcaagactattggcacggcgtggtgtgtttgtnnnnatattcaccaccccaaaagatgca

SEQ ID NO: 20556 - DNA, 101 bp, Glycine max
  Clone ID: 700871687H1
gcctcagccatggacagaacagataacagtgagaggattatttgtgagcatgattattggaatcacattcagcataatagtcatgaagctcagccacacaa

SEQ ID NO: 20557 - DNA, 219 bp, Glycine max
  Clone ID: 700871688H1
agtcgagcgaattcggctcgagggccaacctgaaaagataccgtagtgaggaggatttcaagttacaagctatgaatccctatggacggaccaagcttttcctggaagaaattgcccgagatattcagaaagctgaaccagaatggaagatcatattactgagatacttcaatccagttggggctcatgatagtggcaaactcggtgaagatcccaagg

SEQ ID NO: 20558 - DNA, 206 bp, Glycine max
  Clone ID: 700871689H1
gctagctaagcgaactacagaccaaactcttcagcagtttgtttgtgcttagcttcttcttctgcttttgctttctccaccaccacagccaccgcgtattctgccactgcctccaacactttcttccttctctcttgtttccttctcttctgtctcctctcagctccttcctgtgtttccatgttctctggtattgagacaggaga

SEQ ID NO: 20559 - DNA, 212 bp, Glycine max
  Clone ID: 700871691H1
cttccgagttccgagttgcgagttgcagagagagcaatgagtcaggaatcgtgtatatatagcttcgtggctcgggggacgatggtgttagccgagtacaccgagttcactgggaacttccctgcaattgcagctcagtgcctccagaaactaccctcttccaataacaagttcacctacaattgcgaccaccacaccttcaattttctcgt

SEQ ID NO: 20560 - DNA, 228 bp, Glycine max
  Clone ID: 700871701H1
ggaaaatgttcctttcattaatggaagtcctcagaacacttttgtaccagggctgcattgatcttgccatcgcgaggaacactttgattggtggagatgacttcaagagtggtcagaccaaaatgaaatctgtgttggttgattttcttgtgggggctggtatcaagccaacatctatagttagttacaaccatctgggaaacaatgatggtatgaatctctcggctc

SEQ ID NO: 20561 - DNA, 70 bp, Glycine max
  Clone ID: 700871702H1
cttcttcaatctagcgaaggtggtctcgattgctagtgatccacgatacactctacggttcagaaaacct

SEQ ID NO: 20562 - DNA, 220 bp, Glycine max
  Clone ID: 700871704H1
ctctctcttttcttcccattttgccccttcctcctttccttgtttccgaggagggccaaccacatatgctaaacaaggaaactaaattctaacctccttcagatctacaccacccttctcttttttttccagtttcataaattctacaccatgggcacggcggttctacggccacaagattgtttcacccaccgcatcgctgttccaccggcggggtttt

SEQ ID NO: 20563 - DNA, 222 bp, Glycine max
  Clone ID: 700871705H1
catggttgacggctataggatatgtggtgttgggagttactatactggctcttcttgcagaacccttaatagcaagtgtccaaaaattctctgaagaagcaggaatttcatcatttttcatctcattcattttagtccccctggctacaaattttagagaagcaacctcagcaatcaaagaagctagccataagaagaccagtaatacttctcaaacaatgt

SEQ ID NO: 20564 - DNA, 221 bp, Glycine max
  Clone ID: 700871708H1
atggtgccaaggtcttgatggtcttgcgtctcgctcagctgcatactaccagcaaggtgcccgtttcgccaaatggcgtactgttgtgagcatccccaacggtccctctgctctggcagtgaaggaagctgcctggggtctagctcgctatgctgcaatttcacaggagaacgggttggtcccaattgtggagccagagatcttgcttgatggtgagcatg

SEQ ID NO: 20565 - DNA, 222 bp, Glycine max
  Clone ID: 700871709H1
cgttcttccatagattgaaagccggacgcccaattcctatccccagctcaggactacagataacccaacttggtcatgttaaggatttggcgacacttttatccaagttcttggtaatgagaaggccagcaaggaagtattcaacatctcgggagagaagtatgtcacgtttgacggattagcaagagcatgtgctaaggctggtgggttcccagagccaga

SEQ ID NO: 20566 - DNA, 220 bp, Glycine max
  Clone ID: 700871711H1
ctatggcatctgcaacacgtttagtgcactgcgagctgcggtcggcgaggcccgcggttcgggcgagggaaccggccggtccggttcaggttacgatcccgaaacccaaagcggcggaggcggaaggcgcgaacatcgttttgcagccgcggttgtgcactctgagatcctacggttcggatcgagcgggggttctgatcaaggcccgcaaggagggtga

SEQ ID NO: 20567 - DNA, 220 bp, Glycine max
  Clone ID: 700871713H1
cgtttagtcacttgacgaggttccatcctcaaatttggacaacaacatagatgttgacaacaccgaaagaagtgattatgaaagcacatcacagcttactgtgccacagatactttcagctgaggtggctagtcatggggaaaaaacttcaaaaacggagcttttcctaatttctggtgctgcatgcttgcctcatccctctaaggtcgagaggatgctt

SEQ ID NO: 20568 - DNA, 220 bp, Glycine max
  unsure at all n locations
  Clone ID: 700871714H1
caggaataaaagtagtagatcttttagctccttatcgtcgtggaggaaaaataggacttttcggtggagctggagtgggtataacggtactgattattgaattgatcaataacattgccaaagctcatggaggtgtatctgtatttggcggagtaggtgaacgtactcgtgagggaaatgatcnttatatggacatgaaagaatctggagtaattaatga

SEQ ID NO: 20569 - DNA, 219 bp, Glycine max
  Clone ID: 700871715H1
cgggagatgaatcaggtcattcatatggatgaagctcattattttccttctgataggaaatttggttcttcaatgaagagtaatggggcatattcttcaggtttttcggtgtcttcggttccaaattgcgggcagggatgtatatggaaaacagatttaataataagctttggagtatggtgtatccacagtattcttaacctctcaattgtagaaagc

SEQ ID NO: 20570 - DNA, 65 bp, Glycine max
  Clone ID: 700871716H1
ctcttactccaagccaacccctcccagttgaaatggaaccagttaccttcccttccacacaacat

SEQ ID NO: 20571 - DNA, 231 bp, Glycine max
  Clone ID: 700871650H1
aaacagaagtagaattcaatttcattgatgaaagtttcaatagtgaaattgagtttgacccttgtcagtatgataaagatcagtctagcagttcaagtgcatgtggaggatttgctgagcaatcggttcaacaaatggcacttacgtgtgatcaccagcttcaagaccgatcaactttcaaacacacggatgacattttcttggattctgtacttgaagattttccatgtg

SEQ ID NO: 20572 - DNA, 231 bp, Glycine max
  Clone ID: 700871607H1
ggtcaggaaccttttctattgatgttcagtatgatgacgtgagtggtttgcaaacacctgcaaagatcagcacatatactattggccctctccaatctacaaaaaatgactaagcaaaagttaaagtgaaagttcggttgaatgtgcatggaattatatctgtcgaatctgcaactctactggaagaggaagaagcttttgaggttccagtttacaaagaacctgcaggag

SEQ ID NO: 20573 - DNA, 231 bp, Glycine max
  Clone ID: 700871608H1
atttggaagacattgtcaatttaatatatgaaacgctgtcaaatccatcttacaaaggtgttatcaatggaactgcaccaaatcctgtgcgattggcagaattgtgtgatcagctgggacacgcttgggtcgtccctcatggctaccagtaccagactttgcgctcaaggctgtccttggagaaggtgctactgtggttttagaagggcagaaagtgcttcctactcaagc

SEQ ID NO: 20574 - DNA, 230 bp, Glycine max
  Clone ID: 700871609H1
cattttctttctgtcgagaaaatttagtgaacccaaaaggagagaactttctttggtttgtgcttcattttgttgtggttttctgtaagattaaatggctgaggttttgaccaaggcgagtttggtttcctcttcttcttcctcatggcatggggttggtcaacggcatcatcgaagggtttcaacggtttccaacacttgtagcttcggttctggcgtgggaaagttct

SEQ ID NO: 20575 - DNA, 231 bp, Glycine max
  Clone ID: 700871610H1
ccatttttgaatgtcaatgagatggagaaactgcaattaagtgatgatcttcctaggactggaatgaaagtgatagggaagctgaaccctgaagatggcactatctttctcaaagtgcaaatttctgataaggatggttctgctagaaatgtattttttccctttgacatattatctgacacacctattgatgttgcaaccgagatggtgaaagagttggagattgcagat

SEQ ID NO: 20576 - DNA, 234 bp, Glycine max
  Clone ID: 700871611H1
aggagctcttctccattggttctgcatctgcatgcacacacttgcatagttttggaaaccaagaatttttgaagggtagcatcaacaagaagttctggaaatggagatcaccaatgtcagcgagtatgaagctattgcaaagcagaagttgccaaagatggtgtttgactactacgcatctggtgcagaggaccagtggactctgcaggagaacagaaatgccttttccagaat

SEQ ID NO: 20577 - DNA, 234 bp, Glycine max
  Clone ID: 700871612H1
cttagcaacagcatgctcatcactattctgtgtggaacctgtgaaatgtgctatagctttatttcaacttctccatggcttcttctctttccttatctcttcccaagttaaacttaataaaggcctcttcagcagctaacaccactacaacaacaacaggcactcttcccacagctgagacactgaatgagaaatttggcagaaaaggcatcaagttcttggagtctgataaca

SEQ ID NO: 20578 - DNA, 238 bp, Glycine max
  Clone ID: 700871614H1
tctcccattacattatatactcttccaactgctgactactaactgaaatagcaagaacattccgattttccttgttgcaaatatgttgggcaccgtcgagtcaaacggtgccgtttgttattattcagagcttgggattgtcaaacattgcaccgacgacgaaattcgatgcgcttatcgtaagatggctctgaagtggcatcctgataggtggatcaaggaccctaagcttgcacta

SEQ ID NO: 20579 - DNA, 231 bp, Glycine max
  Clone ID: 700871615H1
ctctgagatggcaaagaatgtggggattctcgctatcgacatctacttccctcccacctgtattcagcaggaattgctggaggctcatgatggtgccagtaaagggaaatatactattggacttggtcaagattgcatggcgttttgtacagaagtagaagatgtcatctcgatgagtttgacagtagtttcttcccttcttgaaaagtatgcgattgatcctaaacaaat

SEQ ID NO: 20580 - DNA, 234 bp, Glycine max
  Clone ID: 700871616H1
cagagacagagacgcagccatggggcggagacctgcgaggtgttataggcaaatttagaacaagccataccccaagtcacgtttctgccgtggtgttcctgatcccaagatcaggatttatgatgttggtatgaagaagaagggtgttgatgagtttcctttctgtgtccatctggttagttgggagaaggaaaatgtttcaagtgaggccctggaagctgctcgcattgcttg

SEQ ID NO: 20581 - DNA, 237 bp, Glycine max
  Clone ID: 700871618H1
aagaagtgaacgagcttgtttatgatgacccgccagtgatttacacctgctcacattctttggttggcccttctagttgtgttagtcaatcacttaagcttggcaagctcactattcatgagaccgaggattcgttggaactagtggatcatgtcaatggagagaccattaaagacatcaaagattcttcatttgtcgacaaatcattgaaagatgaagatgggaatctcaagaaga

SEQ ID NO: 20582 - DNA, 232 bp, Glycine max
  Clone ID: 700871619H1
ccgtaagctcccaagcagtgggaggaggctcgggactccgaccgcgtgcctgttgatgaatgagccggcgactcataggcagtggcttggttaagggaaaccaccggagccgtagcgaaagcgagtcttcacagggcaattgtcactgcttatggacccgaacctgggtgatctatccatgaccaggatgaagcttgggtgaaactaagtggaggtccgaaccgactgatgt

SEQ ID NO: 20583 - DNA, 224 bp, Glycine max
  Clone ID: 700871620H1
attccacaacagtggcaatagaatccaaaaacacacagtgcaaaagatcgcgcggttgacgaagtggtgtactgcgcggtcgcggtgctattatgcgccgcggccggtgcgtcgtgggtggaggaggcggcgaacccgatacgaatggtgtctggcgtggaggcggaggtggttcgggtgatcggggagtgccggcgtgcgttgaagtttgctaggttcgtgag

SEQ ID NO: 20584 - DNA, 229 bp, Glycine max
  Clone ID: 700871622H1
acacaacaacgcaacgacgaacacgcaacttacgcttacgatacatacataatgcacgcaatcagaactatcattcttgtttcaacacttctctccgcggtgatcgccacatgtgatttctcaggatacatctccagtgctattggaacccggatctgctcaggatctaactcattctctctacaaggaactaactgtcctggatatgagcatgatgcaattagtttca

SEQ ID NO: 20585 - DNA, 229 bp, Glycine max
  Clone ID: 700871623H1
tcgagacccaatcaccaaacacgacactttgagtggctacctcttcaacattgcacttctaaaaaatctcttcaggccccaatttcagttgcattgggtcaaaccgacaggaccgtatgaggtaactacacggtggaccatggttatgaaattggtgctacttccttggaaaccggaactgatctttacaggaagttccgttatgggcattaacccagaaaatggcaag

SEQ ID NO: 20586 - DNA, 213 bp, Glycine max
  unsure at all n locations
  Clone ID: 700871624H1
ctcgagcgatgtaggctctagtgcactttccaccaaatcagcgttcgcgaagcataaggagttgctgtaacatgctaatacacgtagtgcaatacataaaataatgaagtttctcatcgaacganctacatgctctgctgntgatatcactacggaagcagtcaatgactttgtcattgattctgacggggatagtgaatctgaagaagtgtc

SEQ ID NO: 20587 - DNA, 233 bp, Glycine max
  Clone ID: 700871628H1
gctctacccggaacgttaaaagtaatgcccgaaccgcatatctctgggttggaaactccgaaacacagtgccccgggcaatgcgcgtggccattccaccaaccgatttacctgccccagacgccgccgttagtttctcctaacggcgacgccggggttgacggaatggttattaacttggccacgcttctcgctggcacagttaccaaccctttcaacaacggttacttccag

SEQ ID NO: 20588 - DNA, 235 bp, Glycine max
  Clone ID: 700871629H1
ccacaatgcagatattcgtgaaaagcctaacggggaagacgataaccctagaggtagagtcatcggacacaatcgacaatgtgaaggcgaagatccaggacaaggagggcatcccgccggaccagcagcgcctgatcttcgccggtaagcagctggaggacggccgcaccctcgccgactacaacatccagaaggagtacacgcttcacctcgtcctccgcctccgcggcggcgc

SEQ ID NO: 20589 - DNA, 235 bp, Glycine max
  Clone ID: 700871631H1
agcgaaacaaataagcggtgcatggaagcttctggtgttgttgaatttctagcatcaattgtgatcaacaacaacaacatcgtttcttcaaatgaggctgactcaaatgagggatctggattcgagttgagaacaagtgcaagcgatgaagcgttgagtttgcttcataatcttcatttatctgatcaagggttgaagactctcttgagcttcaaaaccggcgactttattgagt

SEQ ID NO: 20590 - DNA, 253 bp, Glycine max
  Clone ID: 700871632H1
ggagttcggctcgaggttattgatgcgcctggacatagggatttcattaagaatatgattactgggacatcccaagctgactgtgctgttcttatcattgattcgaccactggtggttttgaagctggtatttccaaggatggacagactcgtgaacatgctctgctttcattcacccttggtgtgaaacagatgatttgctgctgtaacaaaatggatgctactacacccaagtattccaaggccaggtatg

SEQ ID NO: 20591 - DNA, 235 bp, Glycine max
  Clone ID: 700871633H1
aaaaaactttcgaaagattttatcgaattgagattttaaaaatgactgggataaacttaagaattcaattattgaaattgaataagtaaacaatttaattggattggtcgaatggtatcaaaaaaatggagtactaactgccatttcttatttatcattgaatttagcgatcaacttgcattgttatcgaacatttctttttgattgcaaaaattttccggagaaaatttgaatc

SEQ ID NO: 20592 - DNA, 228 bp, Glycine max
  Clone ID: 700871637H1
gtgaatcctgctgtgtgggaaattagtgggcacatggttctaaagaggaagaaggatgcatgatgaggcatctgaaggcaatgcttggaggcttcttgcagaggtgtccctctctcaagagaggtttcaagaagtcaatgatcttatttttgaagccattggctgtggtgaattggaggatgtcaacgttgaaagtgtcaaagaagttgatgcagtcagcacaagcga

SEQ ID NO: 20593 - DNA, 226 bp, Glycine max
  Clone ID: 700871638H1
accaagagaaagctaaaatgggacttgggactctgccactgaccccttcttacagcagtttctcttcaaagtcaggagggcttttacatgacatcaccaatcacagcagggttaatagaagcatgaaattcagagtttcagccaaacaagagaagcaagaagagaagaaaaagcaatctttgttcagcagtgtgactgaagctcttgatttttctcaagtgagatc

SEQ ID NO: 20594 - DNA, 226 bp, Glycine max
  Clone ID: 700871639H1
gaactttcgatgaaccgcgttcacaggtttccgcaccttaaaatctgagacaatagctatcgctacttgatttcaagagtctctcaatgtcttcctacttctttctgtactgtgtcttaagggatagagaatcactctctgtgctggccacagactgcgtgaatcgtatacttttccacacatcatacggatttaagacgatacgtgctgtaggatcaactttcta

SEQ ID NO: 20595 - DNA, 228 bp, Glycine max
  Clone ID: 700871640H1
aaaacacaccaaacagacaaacaactaaacaaggcagagtcacagacacacacagaaagagagatctttggtttcgataaattagaagttgaagggcttgttaattagaaggagactacagtgggtcagaaaacacacgtcgtgttcaggcaaaatccatgtgcccacatggatgattgagagagagagagtattatatttatgacctcaacatcaccacaagcagca

SEQ ID NO: 20596 - DNA, 225 bp, Glycine max
  Clone ID: 700871641H1
gccggacaagagaagtttggtggcctcagggatggatattatatccatgggcaatgcgccattatcatgtttgatgttactgcccgactaacttacaaaaatgtccctacctggcatcgggatctttgccggttcataaatctgtttaacagtttcatcactgattatttatctgcaagttgtttacatcggatgatggacattttctgtataactgatttttca

SEQ ID NO: 20597 - DNA, 238 bp, Glycine max
  Clone ID: 700871649H1
ctctgtcctaccacaaaaatggcgccaggaccaatcttagtcacaacaccaccgccggcaacttctgcaccctctccactgctcaacgcagcgtcacccctcagaacagaagaaaaaccccaaacacaaaccctaaaaacccccaccaccaccactcaaaaagctataaccaaaccaagcccatcatcatccaccaccaaaacgacggcgcagcagcgcgtggagctaaagagaaaaa

SEQ ID NO: 20598 - DNA, 229 bp, Glycine max
  Clone ID: 700871606H1
ccgcgatgggcgtatggagaagttctactgggcacctacaagggacgatcgtgttggcgtctgcaatggaattttccgcactgacaatgttcctaaggatgacattgtcaagcttgttgacaccttccccggccaatctattgatttctttggtgcactcagggctagagtatatgatgatgaggtgaggaagtggatttctgttgttggtgttgacttcattgggaag

SEQ ID NO: 20599 - DNA, 90 bp, Glycine max
  Clone ID: 700871542H1
caaaaaagttggtaatgaagtttaataggcttattcatattcccatacttttgtacttttgaaacaaatatttcgtatacattgtcaggg

SEQ ID NO: 20600 - DNA, 93 bp, Glycine max
  Clone ID: 700871547H1
tagattgtgtcggatgggcttccattcccaattcccaatcgtgttgagtggccatggattctctactggcgaactatgcctcttcagatgaag

SEQ ID NO: 20601 - DNA, 223 bp, Glycine max
  Clone ID: 700871550H1
ggaacactgcaccaaggtcaaacggatatccatccacaagtctcaacatttaagcaccgcctcatcaaacagatgtatcaggcacttctcatgatcattttttgccttcaccaagtgctggaatgttttatgcgatgcctgaaaattatgtacaccagccttctaattctaattatgacagacaagcattttctgctgctgatggggtttttaatgatcttac

SEQ ID NO: 20602 - DNA, 222 bp, Glycine max
  Clone ID: 700871555H1
aagtggtaactccattagatgcctaattgctaaatggtttgagacttggtcttgaaggtgagcaccaatatttaaatgctggtcttgccatcgcactgtgctttacatggctgaaaaggactggacatgttggagatatctatatggaacaaactgacactttgccagagcagttcgtaaaagggttaacaagtgcaagtttgcaaggaagggctcagattg

SEQ ID NO: 20603 - DNA, 208 bp, Glycine max
  Clone ID: 700871556H1
ggctcagcggctcgagaaaatgcccacttactttcttccaacgctcctcctcctactcatagccttagccacctctgtctccggccgccgtgacctcgtcggagactttctccggctgccctccgaaactgataacgacgacaacttcaagggcacccggtgggccgtcctcctcgccggttccaatggttactggaattacagacat

SEQ ID NO: 20604 - DNA, 226 bp, Glycine max
  Clone ID: 700871563H1
aaccaacaatatccgcagcgtgttaactcttctccaattggtacaatgataccaacccctggtttgtctaattgctatgaccgctccagttgtgacgaaggagggtggcggtgaaggtgaagaagggaagaggaacaagatggtgactatgcagtttgttttgcctgctgtgtatgggaaggctgaggaggcgcctaagccgaccgatgagagggttgtgatcaga

SEQ ID NO: 20605 - DNA, 225 bp, Glycine max
  Clone ID: 700871565H1
acacaatatgccaaatttcactagccttcatacattgtaaattcttgtcatttggcatattgtgttgagtaaaaacatacaaaaataaaataaaaagacgagaatttacaatgtatgaaggccagtgaaatttgaccttttttaaatttctgtgtcctcttgtgtataataatagatggaaattcattggtcttagagatgtttgtctggctcattaatcaaagg

SEQ ID NO: 20606 - DNA, 217 bp, Glycine max
  Clone ID: 700871566H1
aataaatcctaacccttaatttttaattggagaggatcctccctcggtgggtgacatgaacgacttgaggaagaagagaaaagccgcagggctagagtgagagccgaaacttctcatggaatcgcaaacggatctgcagaaccgacccggaatcttcattatcggatcctccaacgtcgggaaaagcatcctcctatcccgattgacctctgtagat

SEQ ID NO: 20607 - DNA, 221 bp, Glycine max
  Clone ID: 700871572H1
gcgacctcgacctcttccgcctcaacctcggtccggctcccaccggcggctcgatccaatcgcatctcaccgtcctggagcttctctacacgaacgacttcgccgcggcggtggactgcgcgtcgacggcgctggatctgttaccggtggcgctggagctccttttcgaagattgcgtgcgctggtgcgtggatttcctcgaggcggtgccgtggacggag

SEQ ID NO: 20608 - DNA, 220 bp, Glycine max
  Clone ID: 700871573H1
attttatcctcagttcttccaccctcgtcacctgctcttgattctttcttccaatcgataattgaagaacacaacatttcaattcctctctcgatttgttttgcaagttcgataatcgaaagtgcctggtgattcggagttgtttgtgaaaatgagaaggcaggggcactatggggatccatctgccaacacttgtgttggtggtagccagatgcatcat

SEQ ID NO: 20609 - DNA, 197 bp, Glycine max
  Clone ID: 700871574H1
ctgacacttgaagtagcttgttaatgtcacatgcttctaagtgttataagtgcggccatttttgtcaaaagtttcctttcccattttcatgcactctgatccttagcatgtttttcatataacctattatttcacatttcagaatgagacatactgattctgaatctatgattcataaaacatgtttagattttata

SEQ ID NO: 20610 - DNA, 222 bp, Glycine max
  Clone ID: 700871576H1
gcaaggactaaagataacaatttgttgggcaaatttgaactttctggcattcctcctgcccccaggggtgttcctcagattactgtgtgctttgacattgatgccaatggtattttgaacgtctctgccgaagataagaccactggccagaaaaataagatcactatcaccaatgacaagggtagactgtcaaaggaagatatcgagaagatggttcaagag

SEQ ID NO: 20611 - DNA, 220 bp, Glycine max
  Clone ID: 700871577H1
ccattccaacagctgtctctgcactagtctacaaatgccgtcttgtctaatgggcaatgggatgggtggaatgaggtgcagagtggaaatggtttgggtgtggctgagcttttgagaaatgaaagacttggattcaataaattttactcaggatatgatgattcaaaatttcggatgccaaattctggggatctttacaacagaacatttgggatgtgac

SEQ ID NO: 20612 - DNA, 212 bp, Glycine max
  unsure at all n locations
  Clone ID: 700871578H1
gagaaagtgaaagtgtctgagagtgtgtgtgtgacttatggagtccaattcagagttcgacgtgattatcatcggagctggcgtcatgggcagctccaccgcctaccacgccaccaaacgcgccctncnaacccttctcctggaacagttcgacttcctccaccactgtggctcctcccacggcgaatcccgcaccatccgcctcacctatc

SEQ ID NO: 20613 - DNA, 225 bp, Glycine max
  Clone ID: 700871580H1
gtagttgagaactaagaagaaggaaatggcttcctcaatgatctcctccccagctgttaccaccgtcaaccgtgccggtgccggcatggttgctccattcaccggcctcaaatccatggctggcttccccacgaggaagaccaacaatgacattacctccattgctagcaacggtggaagagtacaatgcatgcaggactggccaccaattggcaagaagaagtt

SEQ ID NO: 20614 - DNA, 219 bp, Glycine max
  Clone ID: 700871583H1
gagaaacaaaaaaaaaaaaaaaaactcttccaaagtagaggcagagaatctaaaacctagggtttgggatcccgaagaacaagggaaagggaggaaaaacccggaaccgcggtaagaacgaggcggacgacgaaaagcgggacctggtattcaaggaggccggccaggaatacgcgcaggttctccgaatgctcggaaacggtcgctgcaaacgatttc

SEQ ID NO: 20615 - DNA, 219 bp, Glycine max
  Clone ID: 700871584H1
agagagtggtttcagtgagtgatcggtgttcagttgatccttcataagtcgtcatcatcatcatcatcatcaccgttgattgaagaagatgccgatcagaaacatcgccatcggaaggcctgaagaggctactcaccccgacacgttgaaggcggggttggctgagttcatctccaccttgatcttcgtgttcgccggttcaggttccggcatcgccta

SEQ ID NO: 20616 - DNA, 218 bp, Glycine max
  Clone ID: 700871587H1
tccacgtctaaatatttcttctttctctgatattgaacatgaattaggcttgggtgatgctaatggttgcattgcaactgttcactgtaaatctaacgctacagcagaatggaggctctttaccagaaccttaacaaagatgaggaaggatgtgtcaagccgtttgaccaagtggggagatccaattcctagcaaactgatagagaagattgatgaat

SEQ ID NO: 20617 - DNA, 219 bp, Glycine max
  Clone ID: 700871588H1
acaaccagctcgatgcagagactgagcttcgtcagactaaggagaacacaattggtcagttggagcagcagatcctcggccttgagagtgatatcgcgacacttgagaacaacctgtctgacatgaccgatgctcgcgatcagctcgagcaggatcgtgacgtccaagtcgccaaccttgctgctcaactcgctgacctgaagaccaagtacatggcgc

SEQ ID NO: 20618 - DNA, 219 bp, Glycine max
  Clone ID: 700871589H1
tccgctcgagtactagatcgcgggcggacgctcgcgatctagaactagtcctcgagccggttcacacatctttaccctatcctaaaaagaatttccaaccccaggttcatatactcccgaactcccattgtgaccgccacgtctacaaatagcttcttccaacgttgaatattcaattcatgcatctgaaaaagaacagccttccatagcagcctaaga

SEQ ID NO: 20619 - DNA, 219 bp, Glycine max
  Clone ID: 700871591H1
gatcaccaaagtacttgtgagtgtatacccaacacaaactaagatcaacatggactactacacccgcgtttcagaagttgagagggaacctatcatggagtattccacaccacgaccaatgatgggcaactaccaccaccctaatgctcaccgtgtcctcaacgagaagattgtttatgaggaggatgtgattggaggatcccgccacaaccacatgca

SEQ ID NO: 20620 - DNA, 211 bp, Glycine max
  Clone ID: 700871592H1
ataattgtcagtgcccataaacttttccactgtcttcttgttgcatctcggtggctgctttgatagctgttgtgactacactcaaggctccggatatggtacctcagtgatcggccagtggagctgcaagtaagggtgggaccaacactcaagaagaatagaagattcacacgttgaagcaagggtcttctcaaagactgaaatataaaag

SEQ ID NO: 20621 - DNA, 221 bp, Glycine max
  Clone ID: 700871593H1
catcgttatcatatcattccagcgtcactctgcattgagagtgaagaaggtgggagatggataagccacaaaacggagaagaaaaggaagaaaccacggcctctttctgcggttacgattctcttcaccgtcttctcaaggataatcttaacccccatcacttccaggaagtcagccgtttgcttactgggcttaattgtggaaaagcacttgaagcagtt

SEQ ID NO: 20622 - DNA, 221 bp, Glycine max
  Clone ID: 700871594H1
ggataggatctatgattatgatgtctacaatgacttgggcaacccggatagcggtgataaatatgcacgccccgttcttggtggttcagccttaccttaccctcgcagaggaagaaccggaagaggaaaaactagaaaagatcccaacagtgagaagccgagcgattttgtttaccttccaagagatgaagcatttggtcacttgaagtcatcagattttc

SEQ ID NO: 20623 - DNA, 222 bp, Glycine max
  Clone ID: 700871595H1
gaccatcacccttgaggtggagtcctccgacaccatcgataacttgagagctaagattcaagacaaggaagggatcccacctgaccagcagagacttatctttgcgggtaaacagcttgaggatggtcgaacccttgccgactacaacatccaaaaggaatccactctccacctcgtgcttcgcctcaggggtggcatgcaaatctttgtcaagactttgac

SEQ ID NO: 20624 - DNA, 222 bp, Glycine max
  Clone ID: 700871596H1
gtttgtattatcactgagaattggtctaccaaatcatattgttcaaggattatgtcgaatgcaatccagaaactgttgtatagcctattgtttattggttatatcttcaaaatgttgccgtaactaccagacagactacattaatttgctcaggattggaggaaactgtactcttaagtttatccttgaagctcatgatttactatattgacccatgcacaa

SEQ ID NO: 20625 - DNA, 241 bp, Glycine max
  unsure at all n locations
  Clone ID: 700871601H1
tgtaaggagtcgactagtcttgttgttacgagctgctgagcgtaagccgtcgttgcctagatttgtcgtctgcaaaggatttatccctacgcattgtgaaattgcaattcgtcagctcgaccccgggacttctacccggagccggtcgccaacctgctaaggttcagggccaaaggctattcgtactctagccgaatcggatcangtggtggcgctgttgctgttgctgttgatgttgtgg

SEQ ID NO: 20626 - DNA, 244 bp, Glycine max
  unsure at all n locations
  Clone ID: 700871603H1
ggctcgagctcaaaaatcagtatattctcccttgttcaatcaattactcttcttccttcccttccttccttccttaaacccaatcgaagaaaaataagatgttgttccacactccatcatatagagactnttaataacaaactcaatttatgggtttattatactttgattgctcaattaatccttacttcttagttagctggttcatcatgaatatcaggtcagacggtgttcggaacgtacg

SEQ ID NO: 20627 - DNA, 232 bp, Glycine max
  Clone ID: 700871605H1
atccagacaatcctccatctgttagatttcaaacaaggattaacatgacatgtgtcaatcaactgactggagtggttgagccacatttgtttcctatgcttgctaattggaaacgtgagcgtacaatggaagacattttgattcaattgaagagagaaatgatgtctccccaaaataggaagctaactcagcctcctgaaggcaatgaagaatccagggttgatcaaaaggg

SEQ ID NO: 20628 - DNA, 225 bp, Glycine max
  Clone ID: 700871541H1
ctagcgcttcttctctcgcattccgtggagatctagtgctgccaaacctcgctgaaaattagggtttcgtttcggaggtagacgaagatgttcggaagggcaccgaagaaaagcgacagcaccaggtactacgaaatcctcggcgtttcgaagaacgcttcgccggatgatttaaagaaggcttacaagaaagccgccattaagaaccaccctgacaaaggcggt

SEQ ID NO: 20629 - DNA, 240 bp, Glycine max
  Clone ID: 700871487H1
tgcaattcgaggaactggtgaaaagaggcattcttccattcaaagatgaaaattttgctattgatggcaccttggataagagtttaaattggatttctgaaatgaaggatattagactcaaagaccttccaagttttatcagaacgaccactttggatgatactatgtttgatttcttgggttctgaggcacgaaacactttgagatcatcttcaatcatcattaacacattccaagact

SEQ ID NO: 20630 - DNA, 237 bp, Glycine max
  Clone ID: 700871490H1
ggcttatggtggatacctaggcacccagagacgaggaagggcgtagtaagcgacgaaatgcttcggggagttgaaaataagcgtagatccggggattcccgatataggtcaacctttcgaactgctgctgaatccacgggcaggcaagagacaacctggtgaactgaaacatcttagtagccagaggaaaagaaagcaaaagcgattcccgtagtagcggcgagcgaaatgggagca

SEQ ID NO: 20631 - DNA, 241 bp, Glycine max
  Clone ID: 700871491H1
ctttctccgatggctaatccctcactcttgttcttcagtctcctcctattatccgccaccgtagccgccgccgaacggatcgacgatgaagacgaccttctgatccgtcaagtggtgccggatgcggaggaccaccacctgctcaacgcggagcaccacttctccgccttcaagacaaagttcggcaagacctacgccacgcaggaggagcacgaccaccgcttccgtatcttcaagaaca

SEQ ID NO: 20632 - DNA, 238 bp, Glycine max
  Clone ID: 700871492H1
gaagaaaagtaaagagagagaaaagaaaaaatttgttttataactttttaacttagtgttcacttcttcttcttcttctgcttcaatatcttggttctttgatattattctattgagcaaaaaatgggagttccagagagagaccctcttgcacaattgagtttgcctcctgggtttaggttttaccccacagatgaggagcttttggttcagtacctttgccgcaaggttgctggcc

SEQ ID NO: 20633 - DNA, 241 bp, Glycine max
  Clone ID: 700871493H1
gacagagactgtcagcttcgcaccgccatgaacgccattgcaactgctgcacttctctctctccctttctccttctccaaatcatccaagcttgacaccaaaaagggtttgaaaggaaggtttagagtgtttgctgtatatggagaagagatagataagatgagtacatggagtgcgctctttgatgtggaggatccaagatccaaagtgccgcagtataaagggaagtttttggatgtat

SEQ ID NO: 20634 - DNA, 238 bp, Glycine max
  Clone ID: 700871494H1
tggctcgtcactccttgctcttagccctcctcctcttcgccgccgtggtcaccgccgcgatggcggtgcgcgtccgacgccgacgacatcctgatccgtcaggtggtgccagatgttggcgaacgaaagaggaggacaacctgctgaacgccgagcaccacttcgcgagcctcaaggccaagttcgccaagacctacgccaccaaggaggagcacgatcatcgcttcggcgtcttcaa

SEQ ID NO: 20635 - DNA, 243 bp, Glycine max
  Clone ID: 700871495H1
accaaagttccaaattttttggtttggggatagatagagtgatacgcgtcacattttcataataataaaaaaatggcagcggcggcggcagtgacggtgctactcccacctaggattccgaccaccaccaacgttacccgctgctctgctttgccttctctccctcctcgcgtctccaacaccaaaaccactttgttctcaccttccctcaacaacttttcagtgtcccgaaaatcttctctg

SEQ ID NO: 20636 - DNA, 232 bp, Glycine max
  Clone ID: 700871501H1
tcaggaactggtgtgtgaggagttgtttgcttgatgaatctgtgtgccgcttccacttcagttctcaatttcttatcgacaatcgagatctgatttcttcaacttggggtgtcattgacataaatgcaaacaatcttgaatttgaaggcagtaagtgaatatctaaatccctgaaagacatgcagtcagccttcgttctgctgaaatgaagaacttgcagacctcggaggaa

SEQ ID NO: 20637 - DNA, 229 bp, Glycine max
  Clone ID: 700871503H1
tgctaccatgagatctgatgaatacttgactcggcccaagttcctgcaacaggaaactgctagtggaggaaatcaatttcctttcaaggaggccactgagcttgatcaccgatcagctgacattttggtcaacatcgactctcaagaacccagttggtgggtttgggttacagatgaggtggatcctattaatgttgaggaattgagtggaattgatgatgagagttac

SEQ ID NO: 20638 - DNA, 229 bp, Glycine max
  Clone ID: 700871510H1
agaacttcatgaccctgtccaacatcaaggttcctctcattcttggtatctggggaggcaagggacaaggaaaatatcttccaatgtgagcttgtctttgccaagatgggaatcaaccccatcatgatgagtgctggagagttggaaagtggaaatgcaggagagccagcaaaactgatcaggcagagataccgtgaagccgcagacttgatcaagaagggaaagatgt

SEQ ID NO: 20639 - DNA, 230 bp, Glycine max
  Clone ID: 700871512H1
gagttgatcatgatgttttggctgaaatggatgtgctgtataggtgcatcaaagatgctttgagactccatcctcctctaatcatgctgatgagaagctcacacactgattttagtgtcacaacacgagaggggagagagtatgacattcccaagggtcatataattgccacatcacctgcttttgcaaacaggctaggtcatgttttcaaagaccctgataggtatgat

SEQ ID NO: 20640 - DNA, 232 bp, Glycine max
  unsure at all n locations
  Clone ID: 700871514H1
tctcacattacattatatactcttccaactgctgactactaactgctatagcaagaacattttgattctctctgtngcaaatatgttgggcaccgtcgagtcaaacggtgccgtttgttattattcagagcttgggattgtcaaacattgcaccgacgacgaaattcgatgcgcttatcgtaagatggctctgaagtggcatcctgataggtggatcaaggaccctaagctt

SEQ ID NO: 20641 - DNA, 232 bp, Glycine max
  Clone ID: 700871515H1
gttcttccatttgactcttgttctgaacgacttttcaagagaatcaaaccatggcagtgaaagtatacggtccccactgtgcttccaccaagcgggtgctggtttgtctggttgagaaggaagtcgaatttgaggttgtccctgttgatgtcactaagggggagcagaaggatcctgagtacctcaaactacagccatttggagttgttcctgtcatcaaagatggagatta

SEQ ID NO: 20642 - DNA, 230 bp, Glycine max
  Clone ID: 700871517H1
ccctgctgctgctgttcttctcgaacgaacctccaatctgcttgtcacaaaagaggaagggttggaactctatgaagacatgatattagggaggttttttgaggacaagtgcgctgagatttattataggggcaaaatgtttggttttgttcacttgtacaatggccaagaggctgtgtcaactgggttcatcaagcttctgaagaaggaagattctgtagtgagcacct

SEQ ID NO: 20643 - DNA, 219 bp, Glycine max
  Clone ID: 700871520H1
gatgctgctcaactcggtcttaatggaagcaaatggagaactgtacacaatttcaatgagttgagcagcatcaaaaaactcattgaaattgtgtacatttctccatttgcttccattaagaccgagtttcattttctgttcagtgtaagcattatgtccttgtatggttacaaattatgagcggttgatacaagacccggtttccaacatgaatgccag

SEQ ID NO: 20644 - DNA, 240 bp, Glycine max
  Clone ID: 700871523H1
ctctaggaacagtgattatggcagctactttaggaacactctgtaattgggtgattgctcatcgccttgaggcctcaagattgcgaagtcttaggacaacaatgagcagtaggcagtcaatgtctatgtcaatgatgtcaggatcagagaatgagtataagacagtgtatgcaatataactttgattactaccatttcagagttctccctccttttttggccagttacactaacattgta

SEQ ID NO: 20645 - DNA, 229 bp, Glycine max
  Clone ID: 700871524H1
ccagtaccaacctcaaatttaatgcaaaaagtatctttccttctctctcaaatgctttccataaccatggaagaagaagaagaacaagaaccaaagctgatccatggctccaaggccatgcgcatgcacactcctactcccaatcctaacccttcccaaacaatcatgagattggcctcacttgcgatcagcttcaacgtgcggttgaaatcatcccacatgcctcttc

SEQ ID NO: 20646 - DNA, 223 bp, Glycine max
  Clone ID: 700871526H1
gataaacttaagaattcaattattgaatttgaataagtaaacaatttaattgtattggtcgaatggtatcaaaaaaatggagtactaactcccatttcttatttattattagattaaccgatcaacttgctttgttatcgaacatttcttttttatttcaaaaattttccggaaaaaatttgaatctatttttatatgcgaatcaatcctactacttctggtc

SEQ ID NO: 20647 - DNA, 228 bp, Glycine max
  Clone ID: 700871528H1
gtaagctcccaagcagtgggaggaggctcgggactctgaccgcgtgcctgttgaagaatgagccggcgactcataggcagtggcttggttaagggaaaccaccggagccgtagcgaaagcgagtcttcacagggcaattgtcactgcttatggacccgaacctgggtgatctatccatgaccaggatgaagcttgggtgaaactaagtggaggtccgaaccgactgat

SEQ ID NO: 20648 - DNA, 230 bp, Glycine max
  Clone ID: 700871530H1
tctttttctctctttctctctgcttgcggtgcttcacaagccaaatctaacttgtctctgttttctccgatctagtactactatcaatggccggaaaaggagatggtcctgctatcggaatcgatctcggcaccacctactcctgcgtcggagtgtggcagcacgaccgtgtcgaaatcatcgccaatgaccagggtaacagaaccacgccgtcttacgtcgctttcact

SEQ ID NO: 20649 - DNA, 232 bp, Glycine max
  Clone ID: 700871532H1
gcctgtcgtagaagttggtcagctttatctgtgtttatgatatttttggttgctggcagattggtcatccaattagttgaataggaatacatagttggaaatgtgatagttgagaaggttccgaggttatttgatcattagctctagaaaagaaaaaggaaattctttccatgttttgaaattctcagctcatgcttcatagattgaacaatttataccatgtttggttgag

SEQ ID NO: 20650 - DNA, 226 bp, Glycine max
  Clone ID: 700871534H1
gaagatggagaagtatcagatctggagcaggagaatagcgttggcagcgtttgcgtttgctctgctgttccaatcggcctcagcagacgacgtcgttgtgctctctgaagataacttcgagaaggaagttggtcaggacagaggagctctcgttgagttctatgctccttggtgtggacactgcaaaaagcttgctccagaatatgaaaagcttggtagcagcttc

SEQ ID NO: 20651 - DNA, 224 bp, Glycine max
  Clone ID: 700871536H1
ctcactgtcaggaggttaatcacagcagtggcattcttttttctcactttcttttttatgatccccattgcatttgttcaaactctggcaagtcttgatggaatccaaaaagcggcaccatggtcgaagccacttgttgacatccctttcattaagtcattcattcaaggttttctgcccggtattgtgttgaagctattcctcatcttcttgccaacaatatt

SEQ ID NO: 20652 - DNA, 225 bp, Glycine max
  Clone ID: 700871537H1
gtgagatacactaagttatcctcataaatacactctaattaggtggcaagataagtgtctaaccttagtaacattgccacatattgtgttcattttggaattgtgccactaaaattctattcaattcatctatggctgcctcttcttatgctacgcaatcaatcctggcaaaccctttgatccgcatttccagcgggtctagggtgaaccaatttggcgttcctg

SEQ ID NO: 20653 - DNA, 224 bp, Glycine max
  Clone ID: 700871538H1
gaacttgtcaagcaacttccttcatctttctaagctgaccctcctggctgcttcaattttccaaattcaaaaattgtataaaagaccctccaaatcccctcaaacaacaacatttctcatcttcataggctaaataacaataacaacttaacaaattttatttcacccccttaatatttgcacatatctgcagccatggttattcttagagaaattgacttcct

SEQ ID NO: 20654 - DNA, 221 bp, Glycine max
  Clone ID: 700871540H1
ttcttctcttgcggctaggtttagcgcagttcttctagatttaaggaagatgggtaaggtcaaggttcacatcagtattgtggtcattggccatgtcgactctgggaaatccactaccactggtcacctgatttacaagcttggaggcattgacaagcgtgttattgagaggtttgagaaggaagctgctgagatgaacaagaggtctttcaagtatgcct

SEQ ID NO: 20655 - DNA, 244 bp, Glycine max
  Clone ID: 700871485H1
ggactatttgagtccaccaatgatctttccacctttaaaaatcacctacgagattttcttattcagtcaaaagaattttcagctcaggataacaaagatctatatgcagaagaggctgcagctcagagagagagagaacgacaaagaatgctttctattccagggcttattgccccaagcgaattgcaagatgaaatggtggactcatagataggctaaacagtgtgggagttgatagtaatac

SEQ ID NO: 20656 - DNA, 250 bp, Glycine max
  Clone ID: 700871422H1
caggcagtcataaaaagattgatgactgatgtgccttttggtgttctactctctggaggtttggactcttcattggttgcatccgtcacttctcgctacttggccaacacaaaggctgctgagcagtggggatcaaagttacattcattctgtgtaggccttgagggctcaccagatttgaaggctgcaaaagaagttgctgactatctaggcactgtccaccatgagtttaccttcactgttcaggatg

SEQ ID NO: 20657 - DNA, 251 bp, Glycine max
  Clone ID: 700871424H1
ggataagctttttggttgtgccttgttttcattccaacacgtttgaaagcactgcagggtcacctatgaattttgtccttcaacgaaggacactttctcatagccacgagcattcagtttccacccatggctgctctcacttctctatctttctcagcagtgactcattgctcagaaagaaaagtgaccctttcctccactcgctttctggcttcctcctcagagatatttgggttccgaaccgatttctc

SEQ ID NO: 20658 - DNA, 247 bp, Glycine max
  Clone ID: 700871426H1
cccagaaagaccctctttttttttactttccattctcctccttttcttcctccaatggctgcacctcgctgcctaacgtgaaattagtctcattttccatctgggtcttgtgaattgcgattggaaccgcgttttctcgcttctgggcttggcttagaagtagtcagaatgatgtctgtcacaggcaaaggcattgattttgctggcaaaaacttggtctctggctgctcttcaaatgcttcgtttg

SEQ ID NO: 20659 - DNA, 248 bp, Glycine max
  Clone ID: 700871427H1
ccgtaagctcccaagcagtgggaggaggctcgggactctgaccgcgtgcctgttgaagaatgagccggcgactcataggcagtggcttggttaagggaaaccaccggagccgtagcgaaagcgagtcttcacagggcaattgtcactgcttatggacccgaacctgggtgatctatccatgaccaggatgaagcttgggtgaaactaagtggaggtccgaaccgactgatgttgaagaatcagcggat

SEQ ID NO: 20660 - DNA, 249 bp, Glycine max
  Clone ID: 700871430H1
gaggaaccctagctagggtttggaagaagctgatccgagaagatggtgcagcgtctcacctaccgcaaacgccacagctatgctaccaaatccaaccagcacagagtcgtcaagactcccggtggcaagcttgtttatcagaccacgaagaagagggccagcggacccaagtgccctgtcactggaaagaggattcaagggattccacatttaaggccagcagagtataatagatcaaggttacacaga

SEQ ID NO: 20661 - DNA, 252 bp, Glycine max
  Clone ID: 700871431H1
tggaaacatgactaaccttgtagtccactggaccagccgtaccagacattttagggacacagtcaaagcagcttctgaatttgcttcaagaaatcatttgccccatcgcattcaggatcaaatgttgtcacatatatgtttaaggttcaaaacagaaggactgaagcagcaagaaacattgaatgatcttccaaaggcaattcgttcaagcattgcacaccatctgtttttccctgtcgtgcaaaaggtcta

SEQ ID NO: 20662 - DNA, 266 bp, Glycine max
  Clone ID: 700871432H1
ttcggctcgagcgaccggcgacaccccatctccccttcgtcaattcacatcaagatgtctctcgctgcatcacgtgccgtattacggcaatcgacgttcgccgtccgccgcgctggcatccgcaatgcctcgacgaccgccgaagccaccaacaccgtaaaggaaaccgcgtcaaaggcacagtccaaggcatcagagggtctcaccaaggtcacaagctccgcgagctctgcggcgtcgggtgccggtcaagccgtcaacaatgc

SEQ ID NO: 20663 - DNA, 251 bp, Glycine max
  Clone ID: 700871433H1
aagaaacagagtgagtttagcatcactggttcctagttggaggcttgaaagggttccaaggttagccttatcaaataataataattcaggcgatgatagaaagacaagtgtcgtggtataggtatctgaaggaggagctatctctctccctcatggttggtcagcacaaaaggaagaagaagaagatcaaatctcagaagggttaaaaaaaatgaagggttcgaacaaccggttcttcacggtggggttgg

SEQ ID NO: 20664 - DNA, 100 bp, Glycine max
  Clone ID: 700871441H1
ggcttaaaccctttcggcggcaggaaaaaagtctccccgcccccaaacccaaacaatgaggaagaaaaaacaagggttcagaagacccgttgtcataaaa

SEQ ID NO: 20665 - DNA, 245 bp, Glycine max
  Clone ID: 700871443H1
cttccattaacgggtggtgcctctcttccatctccccagccaaattctctctcaagaaggccacattaggcccttctgtcttcgcaaccgttagcactccttcttctccttcttcttcttcttcttcttccttcccttctctcattcaagacaggcctgtctttgctgcccctgcccccatcatcaccccaactgtgagagaggatatggcaaaggaatacgagcaagctattgaagaactccag

SEQ ID NO: 20666 - DNA, 246 bp, Glycine max
  Clone ID: 700871445H1
ggctcgagccgaatcggctcgacacagctgctagagatcccgtgtattatccgcatcacacgaactcggatcgactgtgggaggatatggaaaaaattgggagaaggaagagaggactatagtgatgatccagattggttagattctgagttggacttctatgatgagaatgccaattttgttcgcgtgaaggtaagagattgctttgatactaaaagattggggtatgtttacgaagatgttgat

SEQ ID NO: 20667 - DNA, 154 bp, Glycine max
  Clone ID: 700871449H1
gttttcttggtgccgggtgatttatgattcatagttcatccagttaattgattttgtgttattttttattactcaaaaagggtttttagtagattgtatgaatctgttctgtttttgctactaaatcattaattagagagagttgtataagttg

SEQ ID NO: 20668 - DNA, 246 bp, Glycine max
  Clone ID: 700871451H1
attgataagcactctgaatggctgtgatggcattccctgggttcattacaagggtcggcaaggagatttctacattttggtcatggacatgcttgggcccagtctttgggatgtatggaattctgttggtcaacaaatgtcaccaaatatggttgcgtgcattgcagtagaggcaatatcaattcttgagaagctccacttgacagggtttgtgcatggagatgtgagacctgaaaactttttgct

SEQ ID NO: 20669 - DNA, 248 bp, Glycine max
  Clone ID: 700871453H1
ctgagtaccaagagaaagctaaaatgggacttgggactctgccactgaccccttcttacagcagtttctcttcaaagtcaggagggcttttacatgacatcaccaatcacagcagggttaatagaagcatgaaattcagagtttcagccaaacaagagaagcaagaagagaagaaaaagcaatctttgttcagcagtgtgactgaagctcttgattgttctcaagtgagatctgctgaggatgctcag

SEQ ID NO: 20670 - DNA, 249 bp, Glycine max
  Clone ID: 700871456H1
attgtggcctctggcgtttcggtcgcggcttctactctcacagccgaagcagaaccatcttccaaaggttttgaaagattgccgtacaagccggaagggtacaattattggacatggaggggtcataaaatacatgctgtagtgcaaggagaaggctctcccattgttcttattcatggttttggggcctctgcattccactggaggtacaacattccagaattggctaagaaacacaaggtatatgcc

SEQ ID NO: 20671 - DNA, 244 bp, Glycine max
  Clone ID: 700871458H1
ggaagtagtggaggacaaggaaacgggattgcagaaatacaccgtagcaccgggagtgaacaagttatcaggggacaaggctgttgtgtgccacaagcagaactacccttatgctgttttttactgtcacaaaactgagaccacaagagcttactctgtgcctttggagggtgctaatggggttagggttaaagcggtagcagtgtgccacactcacacgtcggaatggaaccctaaacatttg

SEQ ID NO: 20672 - DNA, 243 bp, Glycine max
  Clone ID: 700871461H1
cagtccatttggatgagaacgccatctatggagttccgttttagggagggtggagacgggaaagagatatctttgagtagtagtctgtaagtatacttacacattatgcaaaccagaaagaaaataattaaagaggatctcaatagatggagtgcggatacagatcgaattagatcttgccacgaggaccgagctttggtgggagttgtggtcccttcttgattggtagaatgtgccctgagg

SEQ ID NO: 20673 - DNA, 245 bp, Glycine max
  Clone ID: 700871462H1
aagaaaagaaaatcctcaattttctgagcagccaaacactctctctctgtctctcgaaaattctcagtttgcagagaaaatctgaatcatgtcgtggcaagcgtatgtcgacgatcaccttctgtgtgacatcgaaggtaaccacctcactcacgctgctatcatcggccaagacggcagcgtttgggctcagagtaccgacttccctcagttcaaacctgaggagataactgccatcatgaatg

SEQ ID NO: 20674 - DNA, 245 bp, Glycine max
  Clone ID: 700871470H1
cttgtgttcaacgaagacagccacaggcgcagcatgttattgatggctggctcactcaccaaccaccaaaccacaccgtcgcacccattccatcgctgattcctccaatggcttccactaccaccactttccctctgtctctccgcaccaaccaacaaactccattccccaaaccctctttcttctccaataacaaccatctgcatttcaactctaataattgggcctggacctctgttttcact

SEQ ID NO: 20675 - DNA, 245 bp, Glycine max
  Clone ID: 700871472H1
ctcttggtttcatagttgaccgtcctttgaagttcaagcaattgagccttcgaaaggggcttaatttgaagagacgtcatcgggatttcttgctgaaatttgaagaaatgccattggtgtgcccctataggaatcctgctgaggctttggccaaggagtcattggaggcagagaagagatcttgtgcactggtgagggaggttcttgcaatgacggttgagaagcggactttaattgaccacttg

SEQ ID NO: 20676 - DNA, 75 bp, Glycine max
  Clone ID: 700871473H1
caaagttgcaaatgcttatgaacaccctaatatgattgcagaatgtatagctggacaattaaagaatagagtgtc

SEQ ID NO: 20677 - DNA, 149 bp, Glycine max
  Clone ID: 700871474H1
attgattaatgatcagaaacggagggcgggagcgtgagatcgtacggagacgaatcgtcggaggaagcgacgagagtgacgcgtagtatcatgatcgtgaaaccgcccgggtaccagagtggatcgcctccggtttctcccgccggttc

SEQ ID NO: 20678 - DNA, 242 bp, Glycine max
  Clone ID: 700871475H1
cttctttcttctggagggaggtgctgattttttagatgtctttgtctttttaacacaaatagaattatatggtttcgttatgaacttttgtttgtttctcttataatgtgacaggcgtagaatggcttgggctaaatggattcaccattgccatcagtgcatcggtcctgacatttggttctttttttgtaagggtatgatattgccgttttagccttttaggttgtaggtatagcttttat

SEQ ID NO: 20679 - DNA, 241 bp, Glycine max
  Clone ID: 700871478H1
ataaaacaaaaggatgtgtatgaacagcataaagaattaattttactgggagagagggttgttcttgcaactcttggttttgatctgaatgtgcatcatccttataaacctcttgttgaggcaataaagaaattcaaagtagctcaaaatgccctagctcaagttgcgtggaattttgtaaatgatggacttcggacatcactttgcttgcaatttaagccccatcacattgcagctggag

SEQ ID NO: 20680 - DNA, 244 bp, Glycine max
  Clone ID: 700871481H1
cgcaaactcattctgggcggcgatagttttatcgttctctatctccaagatggtcggagaacacggtacgatgtcacttgcctccgatgatcagaaaacaccacttcttcccgtgcacgagccaatcgaaggaacacgcaccagcgtctccttcagcatcaaaacaattctaacactggaaaacttgtacgtgattctgggacctatgctgtctcttttcatatgcctcttcgtgaagctcgac

SEQ ID NO: 20681 - DNA, 190 bp, Glycine max
  Clone ID: 700871482H1
aagataagagtcacacccgtttacaaatttgaggatatctgcgaacttttgcgttcttcgcatgttagtattgtgaaggaggtttcagagtttgtcttaaaacgtttggaaaataaaagcccaattgttaaacagaaggctttaagattgataaagtatgcagttgggaagtctggtgtggagttcagaa

SEQ ID NO: 20682 - DNA, 243 bp, Glycine max
  Clone ID: 700871483H1
gtcgaactccgacggcaccactaacggcgcaatcactgaggcgcagagacagcagcaacagcaaggggggaaggcgttagccgttaagaagccgccgtcaaaggaccgtcacagcaaggtggacggtcgcgggcgccgcataaggatgccaatcatatgcgccgcacgtgtgttccagctcacgcgcgagcttggccacaagtccgacggtcaaaccatcgagtggctcctccgtcaggccga

SEQ ID NO: 20683 - DNA, 247 bp, Glycine max
  Clone ID: 700871421H1
aggaaatgtacagagaacaagtgaacttgctcgttaataagatccagacaatgggtccatcaatgggtagcgactagtttgggcgaagaaagtgctggcttggggaacggaaagtttagtgttcaataactatttgagaagaccatgaccatgaccatgaccatgtccatgtctctgggctgcgtgtgatgtacattggcacagtaataatatattggagaatagtgccatcagcctctgaagaatg

SEQ ID NO: 20684 - DNA, 218 bp, Glycine max
  Clone ID: 700871367H1
taaaagttgcaaatgcttataaacatccttatattattgcagaatttatagctggacaattatcgcttagaggctcgtctcgtatagcaatgataatagctattgaattaactgcacaggcgggtacaaaacgagttcaagtacaaattgcaggacgtatcgacggcaaagaaattgcacgtgttgaatggatcagagcaggtagagttccgccacac

SEQ ID NO: 20685 - DNA, 227 bp, Glycine max
  Clone ID: 700871369H1
gatttccagtacgaatacgatccgtgaaagcgtggcctatcgatcctttagtccttcggaatttgaagctagaggtgtcagaaaagttaccacagggataacttgcttgtggcagccaatcgttcatagcgacgttgcttgttgatccttcgatgtcggcttctcctgtcattgtgaagcagaattcatcaagtgttggattgtgcacccaccaatagggaacgtga

SEQ ID NO: 20686 - DNA, 203 bp, Glycine max
  Clone ID: 700871370H1
gctgaccacggtttatgttacattgccagtgctatctcatctcatgtactagtatagtagtacattgattcttttataaaatgtcacgtatgttaactgttcttgttctataaatatttcgatcttgtgcctgatcagctatgaactatgggaatcacaaaattatgaactgactgtctcaataaaaacattctttagggggt

SEQ ID NO: 20687 - DNA, 228 bp, Glycine max
  Clone ID: 700871372H1
tgtcgacgacgaagatgacgacgactactacgccaccaccgctcctcctgaatccgtttgggctgcgtctcccgtcactctaaacgacgccgccgctgctgctgctgctgaggaaagtgagagtgagttggaaggtcttgatgatgcagatgatgatggtgaggaagaacatgaaaatgacttagaagtgacagaagaagctgagcctgttctccagaagcctcctga

SEQ ID NO: 20688 - DNA, 222 bp, Glycine max
  Clone ID: 700871378H1
cttctttttcacgagcccctggttcgacgtggaatcgacggcgaggaaaagaagccaaatcttcagtcttctgagagtgagatcgaaaatgggaagcgatactagtttggttcaagaagatgcaactctgaaaccgttcaaatcgtacaagaagagtgtaaaaaagcttagaaaaattgggaatgcccttacaattgttgttgttgcaggatgctgttacga

SEQ ID NO: 20689 - DNA, 221 bp, Glycine max
  Clone ID: 700871386H1
gcatttgcgaattgaacctcaaaatcagtctctaatatttttctcactgatttgtctctccagagaactgtatagatagagatggcagctgcaacatctggtgctgtgttaaatgggttgggatcttccttcttgagtggaggaaacaggagccaaacccttctggccactgctattggaggcaaagttggtgctgctgctgttactgttagtcctagaag

SEQ ID NO: 20690 - DNA, 225 bp, Glycine max
  Clone ID: 700871387H1
cttctttcttctggagggaggtgctgattttttagatttcttttcttttttaacacaaatagaattatatggtttcgttatgaacttttgtttgtttctcttataatgttacaggcgtagaatggcttgggctaaatggattcaccattgccatcagtgcatcggtcctgacatttggttctttttttgtaagtgtatgatatttccgttttagccttttaggtt

SEQ ID NO: 20691 - DNA, 225 bp, Glycine max
  Clone ID: 700871388H1
agcgaaacaaataagcggtgcatggaagcttctggtgttgttgaatttctagcatcaattgtaatcaacaacaacaacatcgtttcttcaaatgaggctgactcaaatgagggatctggattcgagttgagaacaagtgcaagcgatgaagcgttgagtttgcttcataatcttcatttatctgatcaagggttgaagactctcttgagcttcaaaaccggcgac

SEQ ID NO: 20692 - DNA, 222 bp, Glycine max
  Clone ID: 700871394H1
aaactcttgaggaatctaatgcaaacttggatgaagtggttgcccttgctcaagagctccagactaaggctaaaaaaagagtgttatggggaacagctcagttgttcatgcatcctcgttacatgccatggtgctgctactagctctgaattaaaggtctatgcatatgctgctgctcaagcgaagaaagccatagaggtgacacattatttggggggagaa

SEQ ID NO: 20693 - DNA, 222 bp, Glycine max
  Clone ID: 700871395H1
ggaagaacaagacgacaacatcacattggaggaggttcattcaccctgttaggtggcgctgtaagtggctagaattgcaagtgaagaaacttaactctgtagcactgaaatatgataaagagctcgcggcatacgatcatagaaagcagcttgagttttcaaagttctcaatagatgatcttaatgtcaagtcagtacctatatatgatggcatccacacaa

SEQ ID NO: 20694 - DNA, 223 bp, Glycine max
  Clone ID: 700871396H1
ggaagaagcctagagatgtaataataaataatataaaagggcacgataactaaatcatatctaggccattatcttagaatcagattattttcactgacatcagtggaaattgtatcaatttatttgtaatcactttataacggttaacttagatgttgacagtgcaagtttgttcttttcttttgttatcttccattactccaaggaagaagcctagagatgt

SEQ ID NO: 20695 - DNA, 257 bp, Glycine max
  Clone ID: 700871401H1
ctgatttggtgcctcttgcacccttgcgactatctccaatagttatccagaaaatgccgagtgtcttcagtaaggaaactgagattgtcatgtatgtcgagaatatgttgaggctggagagtggtgcacttggagaaactgttggttctaccatgctgcctgctcttgtggataggttgctagagttggatgtggaaattggatgggatggaatcctgcaagaagatgctaaaggcatatttgaaatggagttagaa

SEQ ID NO: 20696 - DNA, 118 bp, Glycine max
  Clone ID: 700871402H1
tcggctcgagtttaatttaactagttgatgattatgtggtcattgttatgtcccactttgtatgtcattattgtgtttgtgaacttctttgacaaataaggcttgtttggattaaaaa

SEQ ID NO: 20697 - DNA, 252 bp, Glycine max
  Clone ID: 700871403H1
ttttcatccaaaattctatcaaactcaagctagagtgtgtcaagaaggaaaaaatggtaggtgaagaaactgagatgaaacaacaatccaggttcaagaggatttatgtgttctgtggaagcagccccggaaacaagagtagctataaggatgctgctattgagcttgggaaagagttggtgtcaagaaatattgatctggtttatggaggaggcagcatcggtttgatggggttggtttcccaggctgttt

SEQ ID NO: 20698 - DNA, 253 bp, Glycine max
  Clone ID: 700871404H1
agcaaagccagttacatattcatatgccttctgccacttgattttctctcttgctagcatgtattctgcaatgcttctgactggttggtctacatctgttggagagagcgggaagttggttgacgtggggtggccttctgtgtgggttcgaatcatcacttcctgggcaactgctctgctgtacttgtggtctctcgtagctcctatcatgtttccagaaagggagttctgagcatcacgttcctcagttcca

SEQ ID NO: 20699 - DNA, 252 bp, Glycine max
  Clone ID: 700871405H1
ttttcatccagaattctatcaaactcaagctagagtgtgagaagaaggaaaaaatggaaggtgaagaaactgagatgaaacaacaatccaggttcaagaggatttgtgtgttctgtggaagcagccccggaaacaagagtagctataaggatgctgctattgagcttgggaaagagttggtgtcaagaaatattgatctggtttatggaggaggcagcatcggtttgatggggttggtttcccaggctgttt

SEQ ID NO: 20700 - DNA, 254 bp, Glycine max
  Clone ID: 700871407H1
ggctgcacaagctcttgtatcatcatcatctcttaccttctcagccgaggctacaagacaaagtcttggaccaagatcactccaatctccatttggcttctcaagaaaagcctcctttcttgttaaggcagctgctactccccctgtcaagcaaggatcagacagacctttgtggtttgcatcaaagcaaagtctttcctacttggatggcagccttccgggtgactatggatttgaccctctgggactttcgg

SEQ ID NO: 20701 - DNA, 107 bp, Glycine max
  Clone ID: 700871408H1
ttttggcggcagcaagaatcaacattgatatttgtctctccggcgcagggtacgatacagaacagagcataatccagaagctacttccatttcaccaaacaccctca

SEQ ID NO: 20702 - DNA, 253 bp, Glycine max
  Clone ID: 700871409H1
ctcagttcatgggcgcaggatccaaccaatgcagtttcatcatttcaagtcagtgttggtagagctggaaccacaaacaaaactgtcaaagtccccaaaaacttcaccttgaaagcaccaggaccaggttatacttgtgggccagccaagattgtggcacccactaaattcattacttcagacaaaaggagagtgacccaagcactgatgacatggaatgtgacatgcacatactcacaatttctggctcaga

SEQ ID NO: 20703 - DNA, 104 bp, Glycine max
  Clone ID: 700871410H1
cgcacattccctcaacactggagtcactaagtgggactcggtggaaattcattctgggactcagctaagctgaccaaccatgattcaaaatggttgcattgtat

SEQ ID NO: 20704 - DNA, 248 bp, Glycine max
  Clone ID: 700871411H1
gccaaagagcatatctattatcggctggtccagttccttgtcataattcttgcaatacttgtgatagttggtttgctggaattcactaaattcaaattcatggatattttcactagcctgttggcattcatacccacgggctggggcctgatatcgattgcccaagtattccggccgtttttgcagtccactatcatttgggatggtgttgtttcagtggctcgtatatatgatataatgtttggagt

SEQ ID NO: 20705 - DNA, 253 bp, Glycine max
  Clone ID: 700871414H1
cggtttgcttagtacgttaatggcaaaccaggtggttcctcgtgaatctcacccttatgcctttcatgtctctggccctcgcaagttcacttcccttaattggcgggaccttatcatttccagttggaaggatgcaaattataagagaactgtcattgcctgctttatacaggcagtatacttgcttgaacttgatagacaggagaagagaacacaaggcaatgctcttgccccaaattggtggattcccttc

SEQ ID NO: 20706 - DNA, 252 bp, Glycine max
  Clone ID: 700871415H1
gacgagttggcggaatgcaaactgccaagaccaaggaatagtgatcagattggaatatcgggaagcaaaccctttcgactcgttttgaagaatgaattgcctgatacaatttatactaactccaagatcaaagcaagaggcaacactcctcttgaggttgttctttttgatattgaatctaagtctatagtcgccgagggttcactgtcttcaatcaagatagagattggtgtccttgatggtgagttctgt

SEQ ID NO: 20707 - DNA, 263 bp, Glycine max
  Clone ID: 700871416H1
tcggctcgaggagagagatggtgaaaatctcacttggtgggtacgatgatggggaaggacccagcaaccgaacccataagcgacgcagggaagaggatgatgatgatgaagaagaagagcaacaacaacaacgaagctttgaaatggtggacccttcaattggaactcaggagcaagaagatcacgctgctccaccccacgatggatcgaattctaacgcaaatggggctggaaccagtagcagggataggtccgttccaatc

SEQ ID NO: 20708 - DNA, 252 bp, Glycine max
  Clone ID: 700871418H1
gcgctgcctgaatatacagccaatagggcccctatgcataacaccttcatgtaatgggttttcaatggcaaagtactattgcaatatatgcaaattttttgatgatgaaaggactgtatatcattgcccattttgcaatttatgccgtgttggacaagggcttggtattgattattttcattgcatgaagtgcaattgttgcctggggattaaatcatcatctcataagtgcctggagaaaggtttagaaat

SEQ ID NO: 20709 - DNA, 233 bp, Glycine max
  Clone ID: 700871419H1
ctaggaatttatggaatcttagtgaacacctcctttatctagggtaggaattatgggtagaggtagtagttgaaaaattcttgtattgtgaaagtagtataatatcgttaacaacccatctctaaaatgggtaattgggatggtgggaattaggatatatgtgataaatttatgtttatactactttttgatgtaccaaaaaaatatatataaaatggtcaagtttaatgttc

SEQ ID NO: 20710 - DNA, 250 bp, Glycine max
  Clone ID: 700871420H1
gttttgtgatgctgctcaactcggtcttaatggacgcgcatggcgagatgtacacaatttcaatgagttgagcagcatcaaaaaactcattgagattgtgtacattgctccatttgcttccattaagaccgagtttcattttctgttcagtgtaagcattatgtccttgtatggttacaaattatgagcggttgatacaagaccccacttccaacatgaatgccagccttagaaccctacatagttttgt

SEQ ID NO: 20711 - DNA, 226 bp, Glycine max
  Clone ID: 700871366H1
tttgcaactcaatgaccctttcatacggaattggattgacctcctctcattcttgcttgctggggtcaaggctaatgccgtactctcagcagagatgatttacatgtttgcagagtggtacaaaccgggatgctgtcttgagtacccccttcatggaagtgcagctattattgatgctcttgtgcgagggctagagaaatttggtggaagaatttctcttcaaagt

SEQ ID NO: 20712 - DNA, 233 bp, Glycine max
  Clone ID: 700871324H1
agctactcgagatggttggattaaaagattgcgcaggaataatggaaaatgggagaattggaagcatatagatagtcatactttgctaggaatcgcaacagcaaaagaaggtggtctcattgtttgtgatacttccaagggtttgctcaaggttacagaagaagatggttttagtgttcttgtttcacacgtaaatggttctcagttaaggtttgcagacgatgtgatagaag

SEQ ID NO: 20713 - DNA, 234 bp, Glycine max
  unsure at all n locations
  Clone ID: 700871325H1
attaatattgctttttaaataggcaattccggtagatattcaagtcacttgttcacacgagttacatttagtnaaaaattgcattatattgtgcgaacttttatgaaagactgaccatctatgtctgtacaaaatattttgggttgttcaaagttctctgcatggctggtgtaatagctcttgcataatgtattgtgtaaataaaggactgtatactatttgcttttgatgttc

SEQ ID NO: 20714 - DNA, 232 bp, Glycine max
  Clone ID: 700871326H1
ggaaattctgagtgctgatgcgcaccttcattcaaggatggagtaattgttgtcgtgactggctgcctaactggaagtgacaatctgaaaaggaagtttactcagtcctttttcctagctcctcaggacaaaggctactttgttttgaatgatgttttcagatatgttgatgagtataagtcagttgatattgaatctgtgccagcaaatgatgctgctaccgctgatgaaa

SEQ ID NO: 20715 - DNA, 222 bp, Glycine max
  Clone ID: 700871327H1
tgcaaacattagctatccctacaatactccttgtgatattcatatgggtggtacaaccaaagcaacgtcatgggaagattgcaccaggtcccaaggcgttgccaattattggtaacctccacatgctagggaaactcccgcaccgcacccttcaaacctttgcaagaaaatatggacccataatgtccttgaagctagggcaagtccaagccatagtggttt

SEQ ID NO: 20716 - DNA, 69 bp, Glycine max
  Clone ID: 700871328H1
actccaagcattctatatatctagtgcctccacgcatctctaccctaaaatcttcaccacacaacatac

SEQ ID NO: 20717 - DNA, 233 bp, Glycine max
  Clone ID: 700871329H1
aagagaacgaactttttagctgttctcagtagcaagctaatcgatacacggctatcatgttaattattgcaacgaagttttctccctcttttatcatccttttttcccgttttaaaatttctcttttcgagattctttgatgtgggatgaggaactcgatagatggcacaatagatgaacgtgcattctacaccaaacgtggaggccacttacgtttagtccaattcctgctt

SEQ ID NO: 20718 - DNA, 232 bp, Glycine max
  Clone ID: 700871330H1
gtggattactccgacccgcctgaaagttcttgtaattttggattttctgaggaagatcacgccctttggacctgggcatactaagttttcttccatgttcatgtgtgtgtttgtgtcatatgtttttttagtaattagtatttagtatttgcactttttgtccaggcttcaaaaatggctatagctttcgctttatcaggaaagaaatgtttgttttctttttgcctcattt

SEQ ID NO: 20719 - DNA, 233 bp, Glycine max
  Clone ID: 700871331H1
caagattgtataaaattgccattgatagcacataattcttcaacaggttcctggatctaactggcaatgtattggggaaaatttggattgggaatagtataaattggaattgatagaaaaaaaaaaaaaaaaaaaaaaaaaaaaaaaaaaaaaaaaaaaaaaaaaaaaaaaaaaaaaaaaaacaaaaaaaaaaacggggcccccccccctaccagccccccccccccccgaaa

SEQ ID NO: 20720 - DNA, 234 bp, Glycine max
  Clone ID: 700871332H1
ctgttttgtaaaagcaagagacaaagagagagaggaagaggaaggtggaaaagccctagtgtgtgttctgctgagagtccgatacacatctaggaaacgctatctatggctttttacggaggcgcgaaacgcgtttgtgtatccataaggcactattgttcgaattcagcgtcagagaaggtgaatctgataaagcagctgagagagagaacaagcgcagctatgaaggacgtg

SEQ ID NO: 20721 - DNA, 232 bp, Glycine max
  Clone ID: 700871334H1
tgtcgttttaccgcaagatggtgtcgttttcggaaatatgcaaaaagggttgaagttctctcttcagcattgaatctttgattacataggctggtttctttggaactcagttcaattcaataattggtcgtccctttttgtggaactcaattcaattaggttagtggaaaaaatatggttgaatcaattgctgcaacttcactccttggccaccgctcaatttgtggtggaa

SEQ ID NO: 20722 - DNA, 224 bp, Glycine max
  Clone ID: 700871335H1
atttttggtaatgttgtcattttcccaatctttgcctggctaaggaaaaacaaaaccggaagcgctcactaggcagccatgccaatttggcagttgtgtccaaacatccattccgttcctcaaatcgtagcgtgcacccgcaacgacaaaacgggatcgaaatccgtttcagggagacccaaggtgagccctcaactgaaccggtggttcagagcccgagccgt

SEQ ID NO: 20723 - DNA, 226 bp, Glycine max
  Clone ID: 700871339H1
atttcaagcattaggtcattctaccttgaagacaatcgttagtaaataaaaacacataaaggggaatttgggactctgaatcagaaatatcaaggtacaacacgagtcaaacgtgcttatttgcaaacattataaggagtttgaagtgctccacacccagaaaggagactgggtgaatgagtactttgcttgcactcgttatcatcaacaagatgagaagctaggg

SEQ ID NO: 20724 - DNA, 224 bp, Glycine max
  Clone ID: 700871340H1
ccatgaactttgcatctatctatcatcacatccatggccacagctgtgaggctccacgttttcccagaaagtttgaaccaacacaaaacgaggttgctcaggagaggctttggctcatgcccttcacctggggtgcttggttttggccataaaaattatgatcagttctctgtgaaagtgtgcagggcttttaggactgaggatggtggggatgtgaaggagaa

SEQ ID NO: 20725 - DNA, 231 bp, Glycine max
  Clone ID: 700871341H1
tggcaaacctgctgaacgaagctgctatattagctggtcgtcgtggaaagacagcaatttcttccaaagagattgatgattccattgataggattgtggctggaatggaaggaaccgtaatgacagatggaaagagcaaaagcttagtggcatatcatgaagttgggcatgctatttgcggaactttgactcctggtcatgatcctgtacaaaaagtaaccttagttcctc

SEQ ID NO: 20726 - DNA, 234 bp, Glycine max
  Clone ID: 700871342H1
acgaggcttcatcaactgcaatcagcgtgcgaactcacaacacacacacacacacgtatatatcatcactcacgctctcaagtgtcaaaccgacatcgatccacaccctacgcagtgacaaaattcgtaaccgttcacactatggttaaagaccacatggaagctggtctccggaagaactccacagcggtccagacggtcctagacgaccttgctcggatcgatgttgcggga

SEQ ID NO: 20727 - DNA, 235 bp, Glycine max
  Clone ID: 700871345H1
ttcggctcgagggttcttagatattaggatgaagtttgattcaaccatcagtgttgcgttcatggtcactgcaactgatgagaagtccatgactggctatggttctcctgtagagttcctatctcatgtggattacgggctttgaggacgatccgtctttggctatactgtgtgctgtgggtggttatgattccaatgctggtgcaactgcaaatgtcttggagtggtcaacgcc

SEQ ID NO: 20728 - DNA, 228 bp, Glycine max
  Clone ID: 700871346H1
ccttgtggctggaagtcgtggtctttacactggaaccagagatattaatgctattgcaaacagcattgctgctatgggattagtatcactgtctggggtatccaaggtagacagtggagtctattcggagctatgtgaaaactatgggaattaggaagcagtgaaaaattccaacgattcaggtggtggtgcctttttggatgatgagggcggatcttctttggatgc

SEQ ID NO: 20729 - DNA, 228 bp, Glycine max
  Clone ID: 700871348H1
gaacaactgaaactattagattcaatttattcgctcctttcttcactgaaccaaaattggattgaatggatgctatcagaaagcaagcctccaagcttcgagaacaggtcgctcgccagcaacaggctgttctgaagcagtttgggggtggcggttatggaggttcagataatgtggttactgatggagtggagctccagctacaccagagacttgagaaactttata

SEQ ID NO: 20730 - DNA, 214 bp, Glycine max
  Clone ID: 700871350H1
cttcggaggatgcaatttactttgagaaggtatagcctgagtctcatctgatgaagacaatgctgtgtaagtcgtataggccgaagaacgttgccgctgatgaacaaaacgttgaattggtggtgggcaatatcagtaaggacactcttgtgaacgaggagaggagtgaagtgaagggctcaagttcgggggctgttgcgaacaggaaggacgg

SEQ ID NO: 20731 - DNA, 222 bp, Glycine max
  Clone ID: 700871351H1
cttgctttctgctttcatcttcactctgtttttgggggtcagatcttaataccgaagcttcgtattctgtttgaatattgatatctattgggagtggagtagtattgagatcgagcgtaaaagaaaggcgatgtttttgtttgattggttttatgggattctggcatcgcttggattgtggcagaaggaggccaagatcttattcttaggtctcgataatgc

SEQ ID NO: 20732 - DNA, 230 bp, Glycine max
  Clone ID: 700871353H1
tagattttcttgtacaagcgtaacttctgggactaagatacttggttttatgcctgtatgatagtgaaatcatgtagcatctgaaatgctttaaccttgtagcaagtccagtacaaattgaatggctctgtggtgtttttgcataccaaaattcaccatatcttatcataatgattggagccaatagagactaacacaatcctacttatttgttatcggatctctataat

SEQ ID NO: 20733 - DNA, 231 bp, Glycine max
  Clone ID: 700871356H1
gcccagtctatggatcaaattaaaaacaatccttgcatagacatgtcagagaatgcatccaacacacatgaacttgaagcctctcaatgaagagagaggttgtcccgaaatctgagggttgaagtcaagtcgatgcttattttttgccatgcttttgaaggcaaagtatattgttagtggcattctgataatgcagtaaatacgtgctgtaagattaactttctaatttga

SEQ ID NO: 20734 - DNA, 232 bp, Glycine max
  Clone ID: 700871357H1
gaagcaatgaaagtgagagagtccaattatgcgaacgctttgtgatgcttgtgagagcgccgcgggtatagttttctgcgccgctgatgaggctgcactttgtcgtgcctgtgatgagaaggttcacatgtgcaacaagctagctagtaggcatgtgagggttggtcttgctagtccaagtgatgtaccacggtgtgacatatgtgagaatgcacctgctttcttctattgc

SEQ ID NO: 20735 - DNA, 212 bp, Glycine max
  Clone ID: 700871359H1
caattttagaaacaagttgacagcaattttcgtcacaaaaaaaaaaaaaagggggggccgccgtctagggacctggtcgcccggggattaattccgggccgggacccggagggggcacaggtttcccctatggggggtcgtttaaggtttgggcgaaactaggggaaaagctgtccccggggaaaattttttaccggcccaaattcccacac

SEQ ID NO: 20736 - DNA, 227 bp, Glycine max
  Clone ID: 700871361H1
ctgcagtgttttaagaataattgctgaaatgtgtcaccgtttaagtcatactattgccttgtgcttgagccttatggtcgtgtgtgttgaatgtatatgcttttatctgcctttatgacactttcatgtgaaagtacgatataataactgctcagctgagtagtgttgttggtattttggggtctgatgtatcataatgcttgacttgactgtctatcgtggctttc

SEQ ID NO: 20737 - DNA, 230 bp, Glycine max
  Clone ID: 700871364H1
ataattggcaaaggtggagaaactataaagaatatgcaagcttctactggagcacggattcaggtgatacctctgcatcttcccccgggtgacacatcaactgaaagaacattaaaaattgatggtactcctgagcaaattgagtctgcaaagcagttggtttatcaagtcatcagtggcgagaatcgtgttagaaatccagcaatgtctggtggttatcctcaacaagg

SEQ ID NO: 20738 - DNA, 231 bp, Glycine max
  Clone ID: 700871365H1
aaattagttcattctctttgcgcagttccctacctctcctttcaagatgcagatcttcgtcaagaccctcacccgctagaccatcacccttgaggtggaaagctctgacaccatcgacaacgtcaaggccaagatccaggacaaggaaggaattcccccggatcagcaacgtctcatcttcgccggaaagcagctcgaggacggccgtaccctcgccgactacaacatcca

SEQ ID NO: 20739 - DNA, 233 bp, Glycine max
  Clone ID: 700871323H1
gcacgagcgcaacttcgtccccggattcgagtacctgtcgaggttccaatctcgctccctcgacgccaacgccagagtagtatccgttgcatggattctcaaggtacacgcgtattatggctttcagcctttgacggcgtacctcgccgtcaactattcggatcggtttttggattctagccagttgccggtgagctctcatttctcggcagctttttaaggatgtgttattt

SEQ ID NO: 20740 - DNA, 259 bp, Glycine max
  Clone ID: 700871185H1
gttgtggttcaagctgagaaggttccctatgtccctgaaggacttgaagccatcattttcacagctgacggtgatatgagacaggcattgaataacttgcaagcaacatacagtgggttccaatttgttaaccaagcaaatgttttcaaggtttgtgaccagccacatccactgcatgtgaagaatatggtgcgtaatgtgattgaagggaattttgatgaagcttgttcaggcctcaagcaactgtatgacttgggat

SEQ ID NO: 20741 - DNA, 233 bp, Glycine max
  Clone ID: 700871186H1
ccttgttgtgatctgctctctgcaaccatgcttctcagaacaggttcatttttctctctcctcaaagccaccgccgaccatatactgcctctctctaactcttcttcttctggtattattcgctactctccatctctggaggcaaactcggttccatacgctaccacagatcccaacaaacggcccttaaccgacgacgattatgaaccctttgacagacgtcaagaggtgct

SEQ ID NO: 20742 - DNA, 245 bp, Glycine max
  Clone ID: 700871188H1
cgcgtcgctccgcaccagtttcaccgcacgaatatcttgctgtgtggagcgatccgagacaaactctctaaacatgttggtttaccaggacctccttacaggtgatgagcttctctctgactccttccgatcccaatgaaattgagaatggaatgctgtgggcagttgaggggaagtgggttgttaaaggagcagttcatgtagacattggtgcaaacccttctgctgagggtggaggacaagat

SEQ ID NO: 20743 - DNA, 247 bp, Glycine max
  Clone ID: 700871189H1
ctttagagagatagagagaggaagaaagaatggcagcttgcactgtctactcaacacaatctctgagctcaaattgctccatctcaaccccatcaaagacgcaactcagttttttccaccaaaagcaggtagttttctggaggaacagcaagaagggcagctgcagcagcagaagaagctatgtgataacatgtgcagcaggtgactcacagacagtggtgattggcctggctgcagactcagggtg

SEQ ID NO: 20744 - DNA, 241 bp, Glycine max
  Clone ID: 700871190H1
aaaaaaaggaagactaaaactaaaactaaaaccccactcagtcttccagtgaaaaaagaaaggcagcgatggaagaagacttcgacatccccggcggcgaggaaatggatctcggcgaagacaaggtcggcgaggtccgggagatcggctcccgcggcctcaagaagaagctcctcaaagaaggtccaggctgggaaaaccccgacagtcgcgacgaagtccaagtgcattacacggggac

SEQ ID NO: 20745 - DNA, 242 bp, Glycine max
  Clone ID: 700871191H1
ggaattggctatagaagcagtgagtcagggtggtacttcagacaacaacatcaatgaatttataaataatctgaaaagatcctaaactaaatatcccttttggtgtcaattaatattgattccataaattgtattagaattttattttcctcttgtctgtttagtagctattatatctttatgtcattctatgttaaatacttaaattattgtaaaaaaaaaaaaaaaaaaaggggggccgc

SEQ ID NO: 20746 - DNA, 229 bp, Glycine max
  unsure at all n locations
  Clone ID: 700871192H1
atttgatttgtatcagaactccatctattgagttcctttttaattattttttagacgggaaagaagcatctttgaatagtagtctgtaagtatacttacacattatgcaaaccagaaaaaaaataattaaaaaggaactcaatagatggagttctgatacaaatcaaattagatcttgacctattcgncgagctttggtgggagttgtggtcccttcttgattggtaga

SEQ ID NO: 20747 - DNA, 245 bp, Glycine max
  Clone ID: 700871193H1
aggaaataaaacaaataccaaagaaccttctatgctttctctcctttgcactttcctcctcttccttgtgattattgtatgcatcacagggagaaactgagacacagaagatgagagagataattagtattcatattggacaagctggaattcaggtgaggaattcatgctgggagttgtatcgccttgagcatggaattaaccctgatggcaccatgcctagtgatacctcagttggtgtagca

SEQ ID NO: 20748 - DNA, 247 bp, Glycine max
  Clone ID: 700871194H1
agaaaacaaaacgcgatggttgacgtcgacgttggaacctcggactcgccgaagcgccaccacaacaacggcttcctcgtaacaatatcggcggttctggcgctgctaacaaagcgcagagcagcgaagcgaccaaagaggatgagtggaagaaggaattgaagaagtcgcggccgaagaagcttctcagcaacataagaagcaaagcgcttttcggtcacaaccacaacaacaagaagaagctgcg

SEQ ID NO: 20749 - DNA, 248 bp, Glycine max
  unsure at all n locations
  Clone ID: 700871195H1
gaaagagttcagctacgagaagatcctcaaagacctcaagaaagagttctgctgcaatggcaatgttgtgcatgacaaggagcttggcaagattatccaactccagggtgatcagcgcaagaacgnttctcacttcctcattcatgctcgcctttgttaggagggacagatcaagattcatgggttttaaaccactaacactaactaccactttcttctatgatgaaattaaacctatggcagcggtt

SEQ ID NO: 20750 - DNA, 230 bp, Glycine max
  Clone ID: 700871196H1
taaagattttatccaattgaaattttaaaaatgaatgggataaacttaagacttcaattattgaaattgaataagtaaacaattaaattggattggtcgaatggtatcaaaaaaatggagtactaactcccatttcgtatttattattgaattaacgatcaactgcttggttatcgaacatttcttttgatttcaaaattttccggaaaaatttgaatctattttatatg

SEQ ID NO: 20751 - DNA, 237 bp, Glycine max
  Clone ID: 700871301H1
agacatgggtacggtggctccaagagttgaaagcttggcgagcagcgggataaagtgtatcccgaaggaatacgtgaggcctcaagaagagctcaagagcatagggaacgtgtttgaggaggaaaagaaggaagggctacaggttccgacaattgacttgagagagatagattcggaggacgaggttgttcgagggaaatgtcgtgagaagctgaagaaagcggcggaggagtgggg

SEQ ID NO: 20752 - DNA, 237 bp, Glycine max
  Clone ID: 700871302H1
cgaaacatggcaagagtggtggcactccaacagaaccaactatctttctctaccttagcttcctctctttctgacttcagtggaaccagacttcaaactcaacttcagttcaagagaaagcaatgccatccaaaagggtctttctacgtctccgcatcgagcaccaagaaaatcctaataatgggaggcaccaggtttattggtgtgtttttgtctaggctccttgtcaaagagggt

SEQ ID NO: 20753 - DNA, 234 bp, Glycine max
  Clone ID: 700871304H1
aaaatggttcactctctgctcctacttcttctcctcctcactctcactgcaacctctgctcaacatgacggcccttcgatcacagccaccatggagcaattctccggttacaaaatccacgaccctcactctttccaaccctcttcactctccgttgatgctcaggctcttcagaaccagattgatgagcttgcggcgttttctgactcacctgctccatcagtaaccagggtc

SEQ ID NO: 20754 - DNA, 234 bp, Glycine max
  Clone ID: 700871306H1
catctttcaatttcaatcaacggttataaccttttctatttgagcatcatcatgtccaccgcagcgcacccaaggccaagaaaacggcgtcgtccaagaagcccctctcccatcctaccttcgccgcgatgatagcggaggcgatagcgagtctgaaggagagaaccggttcgagccaatacgcgataaccaaattcatcgaaggcaagcacaaggagttgcctccaacctaca

SEQ ID NO: 20755 - DNA, 232 bp, Glycine max
  Clone ID: 700871307H1
ggacctccaacctttgagcagcccaagatgactctggagaagctcttgctgtatggtaacatgcttgtccaagaacaagagaatgtcaagagagtccaattggctgacaagtacttgaacgaggctgctcttggaaatgctaacgaggatgctattcagaggggaactttcttccagtcttgaattggaggcaaagcaaacttggcaagtaaatatttctgttcgtgaaggt

SEQ ID NO: 20756 - DNA, 237 bp, Glycine max
  Clone ID: 700871309H1
ctcctctcgctgcgttttccaatggcggccataacccgcctcctaaatcgcacctcttccctctcttccgtggcgcgtggattctcatctcacgcatcgccgccgcgcaaggaggagaggaatgtccagtgggtgttcctgggttgccccggcgtcggaaaaggcacctacgccagtcgcctctgcaacctcctcggcgtccctcacatcgccaccggcgatctcgtccgccacgag

SEQ ID NO: 20757 - DNA, 238 bp, Glycine max
  Clone ID: 700871310H1
ggcaacaacaactatctctcatccttcttctttctgtatccgtaacacttgcaacacacatggctacaatcaccaacactttcatattcaaaccccccatctctcatcacccaaagcagcttctttattcccaccgctcttctctacgctttctcaccaaatttaaaaccccctccggagcgaattctcggcggctggttctgaaagccacggcggctcccggggccaagaagacaga

SEQ ID NO: 20758 - DNA, 239 bp, Glycine max
  Clone ID: 700871311H1
ctcgagccgcgcgccaccccgatcacgcacaccggcactcgttcgattgcatacagtcacttttaccccccaaacgcgccacacgcctaaagatatcaccgccactctaactccccatcctccccctctgcccgacgccgcataccgcccaacatggccgcagtagcatacaaccttgtggaaaagtacgcgccggcgatcgaagagcacctcgttaccgttaatgcgactacggcgca

SEQ ID NO: 20759 - DNA, 234 bp, Glycine max
  Clone ID: 700871313H1
ctaggaatttatggaatcttagtgaacacctcctttatctaacgtaggaattatgggtagaggtagtagttgaaaaattcttgtattgtgaaagtagtataatatcgttaacaacccatctctaaaatgggtaattgggatggtgggaattaggatatatgtgataaatttatgtttatactactttttgatgtaccaaaaaaatatatataaaatcgtcaagtttaatgttca

SEQ ID NO: 20760 - DNA, 234 bp, Glycine max
  Clone ID: 700871314H1
ctcgtcatggagaagttattggaaaagctgcgctgtcgcactttgacagttaccaacgggtctgaagctatacggtatgccatgggcgaagtcaaatttgatgtcatcatgatggagtttcgactacctcaggtcaacggcgctgacgttgctcgtatgatacgagatacgaagaatgccaacacccataccccgatcgttgctgtcactggatatctcaaggaactacaggcg

SEQ ID NO: 20761 - DNA, 233 bp, Glycine max
  Clone ID: 700871315H1
atctgttccttctagtggacctaatgctaatcctttagacctctttccccagggccttcctaatgttgggtctggtgctgctggtgctggttccttagactttcttcgcaacagtcaacagttccaagccttacgcgctatggtacaggctaatccacaaatattgcagcctatgctacaagagcttggcaaacaaaatcctcatcttatgcgattgattcaagagcatcaag

SEQ ID NO: 20762 - DNA, 235 bp, Glycine max
  Clone ID: 700871317H1
gtggatcatcaaacgtggaagaagtgctagttgaaggtaatgttggaaaccacagtatcaatagaagtgtttcaggcagcaacaatggaagcaatggacaaaatgggagcagcacagcagttaatgctggagggacaaacacggaaagcaacaatggactcactgggaatagtggcagtggtgatgctagtggaagtggaagtgccaacagagtagatcaaaacaagacttctca

SEQ ID NO: 20763 - DNA, 235 bp, Glycine max
  Clone ID: 700871318H1
attgactagtatcattaagatggctaattcctacttatccttgcttgtcttgatccttgtagctctgctcctcacccctcaagggcttgctgatgaatctgattcttactataagccaccagtttacaagaaaccaccagtgtacaagcccaagcccaagccacccattcacaagcccaagccacccgtttacaagcccaagccacccgtttacaagaaacccccttatggtaag

SEQ ID NO: 20764 - DNA, 228 bp, Glycine max
  Clone ID: 700871321H1
cacaagccaagtgaaagtgagaaaaaataaaaatcaaagagcataatgtcagggatcattcacaagattggggagacccttcatgtgggagggcacaagaaggaggaggagcataagggtgagcaccatgctggagaatacaaaggggagcaccatggtgaacacagtagtgagtacaaaggagagcatcatggtgaacacaaagctggagagtaccatggtgagcac

SEQ ID NO: 20765 - DNA, 232 bp, Glycine max
  Clone ID: 700871322H1
ctggacaagacaattgcaagtgatttcaaaggaagggagataggaactgaaaagttgatttgacttattgatctgcagaatatttcatataaaaatattgatgcacgtgggttaatcacaggttttcaatttttacaggcttactacccagaacgtttagcaaaatgctatatgttacacatgccatggttttttgtgagtgtttggaaactagtttctcgcttcctagaga

SEQ ID NO: 20766 - DNA, 258 bp, Glycine max
  Clone ID: 700871184H1
ccagtcatgaccgagtctccacttatgacactccctacaactttcctctaatatccaattgtcaacaatcaccattgcggaagaccaaaacaaatccatttcaccgaagaaccatgaccgttacaacagaattcgcagcagcgacaaacgacgaggaggtgccatccggcgtcgttttgttcgggaagtatgagttaaggcggttgctgggagctggcgcattcgccaaggtgtaccacgcgacgagctggacgacac

SEQ ID NO: 20767 - DNA, 254 bp, Glycine max
  Clone ID: 700871141H1
gagaatccgaggcgaagagaagagaaaaattaagatggaggggaaggagcaggatgtgtcgctgggagcgaacaagttcccggagagacagccgattgggacggcggcgcagagccaagacgacggcaaggactaccaggagccggcgccggcgccactggttgacccgacggagtttacgtcatggtccttttacagagcagggatagcagagtttgtggccacttttctgtttctatacatcactgtcttaa

SEQ ID NO: 20768 - DNA, 251 bp, Glycine max
  Clone ID: 700871142H1
caagaagaaagactcaaaaaatggaggggaatctagagaagaagttgctgagcaaagaggaagtgtcagaagaagataatttatcattggtgaagagggtgtgggaagagagcaaagagatgtggatagtggcagcaccagccatattcacaaggtttacgacctttggcatcaatgttataagccaagcttttattggtcatattggttcaagagaactcgctgcctatgctcttgtattcactgtcatc

SEQ ID NO: 20769 - DNA, 249 bp, Glycine max
  Clone ID: 700871143H1
gtgtgtttgcgatgccaggtggggcaaccgtctgctccggtcaccggtttctctgcgttgttctgcattcgactcgtccccgactcagctacccgactcggtcgcgacccgttccggttcaacttggatccgtgtttgtctcgaatgtaatggcgatagtaagcggttcagctccaagttgagcctcattcccagcgccgttgattcttccaccgcacaatcttccgtcgtttccgacgatggcttctc

SEQ ID NO: 20770 - DNA, 245 bp, Glycine max
  Clone ID: 700871144H1
gacattttcaggatggaagggttatatgttcttcaataccaaggtatggaaagggaaaggaagcaggaaacgaagtagactacattgtaggaatgagcacatgttatcctcaaccaggttctgtaaagataattgatggtgaaactataactctagagtctaactacagcagcagccgtggccacactggagtaatggggcttttctacctattggtggcagaacagcttccacaccaacacttc

SEQ ID NO: 20771 - DNA, 252 bp, Glycine max
  Clone ID: 700871147H1
cttgtgcctcaagaaataggttagttccgagctgaaacaagatggctggtgataaacaaaaactctttaacagactgaagccattcataggtgtagtgttcttacagtttggatatgctggtatggatattctatccaaagctgcactgaacaagggaatgagtaactatgtatttgtcgtgtaccgtcatgtttttgcctttgttgtcatggccccttttgcactgatcttggagaagaaagtaaggccga

SEQ ID NO: 20772 - DNA, 254 bp, Glycine max
  Clone ID: 700871148H1
attattataacctcaacttgaactatccatacatagccactttccactcactcttgtgttgttgccttcatggccaagccagtgtccattgaggtatggaacccaagtggcaaatacagagttgttagcaccaaaccaatgcctggaactcgttggatcaatcttctcgttcaaaatgatgttcgccttgaaatatgtaccgagaagaaaacgattctgtcagttgaagacatcattgctttgattggtgataa

SEQ ID NO: 20773 - DNA, 260 bp, Glycine max
  Clone ID: 700871149H1
acttttgcttcttttggactcattctatcttgcaaaatagcaactgatgcttctggtctgtctaagggctatggttttgttcaatttgacaatgaagaggctgcacagaatgctattgacaagttaaatggcatgctgatcaatgataagcaggtctatgtaggccatttcctgcgaaagcaagatagagagactgctctcagcaagacataaatttaataatgtctatgtgataaacttatcagagtcaaccacggatg

SEQ ID NO: 20774 - DNA, 153 bp, Glycine max
  Clone ID: 700871152H1
ccatcttgcaagcagcaagctgcaagcaccttcaacacttgcctcactttcgattccagaatttcccaaattctcattcaccaaccacaatgatggaggaccaccctctctccgtgccccgtgacgaaatggaaaacctcgtactccacgacg

SEQ ID NO: 20775 - DNA, 252 bp, Glycine max
  Clone ID: 700871154H1
aattatttacgtcacgcgtgtatgtttgttgatgtatgatcattgatatcaaacaaatgttagcacgtgtttgactaagtgttaattaattgttagtaaaatccattgacttcgaagtgatatgtagatatttttattgtcaaaagttaggaataaattttggtataaaaatattttttttaaatatgccaagaaataccaatcgtcctaaagttactgtgattccaactagattagtacccagtaaaccaa

SEQ ID NO: 20776 - DNA, 252 bp, Glycine max
  Clone ID: 700871155H1
gtatgtcattattagtggtgcccagaaaaaaacagaagattttgatattgaggatgccgaaacttttgaattgcctgctgatgaagagaagggtaagcttgcagatccattttaccgccttgaacaccaggaagaagacttgaagaaaaagaaggaagctgaaccagtgatcgtacgtctccagaggcagtctgatgcaaggcattcagatgactattctcttaataagactctccgtgcccaacttagagg

SEQ ID NO: 20777 - DNA, 249 bp, Glycine max
  Clone ID: 700871156H1
ctcgagcgcagttgcatttgttcggccggttagtgtggcctttcaggtggtgaatgaggttccatttctacgagaatggagtttacactagtgacatttgcggtagacttcccaggatgtgaaccatgccgtccttgctgtggggtatggagttgaaaatggcgtcccatattggctcataaaaaattcatggggagaaagttggggtgagaatggctacttcaaaatggaattggggaagaacatgtg

SEQ ID NO: 20778 - DNA, 247 bp, Glycine max
  Clone ID: 700871157H1
gcactcatattgccaatctcttacacttacatagccatgatgggttctaaaggactcaccgatgcatcaaagatagccattttgaatgcaaactacatggcaaaacgattggagaattattacccggttcttttccgtggagtcaatggaacagttgctcatgaattcatcattgacttgagaggctttaagaatactgctggaattgagcctgaagatgttgcaaagcgcctcatggactacggtt

SEQ ID NO: 20779 - DNA, 248 bp, Glycine max
  Clone ID: 700871158H1
ccaaaatcccttgatttccttccttcaccgcacccacttatatttcttaaattagttttccaatgcagaaagcagggtacggtggcgatggaatatacaggtctctaaggccttgtttggttctcccaaatgaccccaacctctccctcgtctcattcctctttcaaagcgtatcctctttcccatccaaaatcgccctcgtcgattcccactcttcccaaacacttaccttggcgctactcaaatca

SEQ ID NO: 20780 - DNA, 245 bp, Glycine max
  Clone ID: 700871159H1
gaagattccgcaacagagagtagaaaagatggcgcggttgatcacagtggtgtggtgcgcggtggcggtgctactgtgcgccgcggcgggcgcgtcgtgggtggaggaggcggcgaacccgatacgaatggtggcgggggtggaggcggaggtggttcgggtgatagggacgtgccggcgcgcgctgaagtttgctaggttcatgagcaggtccgggaagagttaccgaagcgaggaagagatga

SEQ ID NO: 20781 - DNA, 249 bp, Glycine max
  Clone ID: 700871160H1
gacaggattctctcatcagccacgtcgatctttgacaacactggagttaagatctcagtgaaggttgccggcattcactggcactatggtacaaggtctcacgccctcgaactcactgcagggtattacaacacccgattccgtgatggctacctccccattgctcaaatgctggcgcgccacggtgtcatctttaacttcacctgtatcgagatgcgcgatcacgagcagccacaagaggccctttgt

SEQ ID NO: 20782 - DNA, 250 bp, Glycine max
  Clone ID: 700871162H1
gttcagcctatcactctctcgaagcttcctaacgcctcctcttttcttcctaaacctaaaccctctcttcctcagtcttacactccctccgccgcacacttatctcggtcagtttgcttaaggactctgtcgccaaaggcaacatcttctgaagaagaaaggtccagtgggggaagtcaatttttcaatgagaagcgcgatggtgtaataatcctggaggatgttaaagaggataataataagaatgagt

SEQ ID NO: 20783 - DNA, 254 bp, Glycine max
  Clone ID: 700871164H1
gttttatttgtggcgatgtctcgcaaggaaaacctgatatctgaatggtagcagtatgaatcactgatatgtggcatgttaacaagcacaatggcagggtgcaatgattggcgtcactctatggcaataactatttgctgaatttgaggcaaagttgcattgtggttctgcatatttgattcagaacattaaagttgttgacaatcattctacatacaaatgatggtgagatgatcatgaccgtgtaggaggaa

SEQ ID NO: 20784 - DNA, 268 bp, Glycine max
  Clone ID: 700871165H1
gaaagggagttcaaggtgctcaaccaggaccaactcttgattggatacagcgagttagaattgcagttgatgctgctcggggattggaatatttacatgagaaagttcaaccaccgattatacacagggatatcagatcaagtaatgtgctaatctttgaagattacaaggccaagatagccgactttaacctttctaatcaggcccctgacatggctgcacgccttcattcaactcgtgtattgggaacttttgggtatcatgctcc

SEQ ID NO: 20785 - DNA, 259 bp, Glycine max
  Clone ID: 700871168H1
ctcaaacattgtttgttgtaggaagaggaatcttgcgaaatggcaggggacagcaagagcaagattctgttcatcggagggactggttacatcggaaaattcatcgtggaagccagcgccaaagctggccacccaactttccttttggtgagggagtccactctctccaaccccgcaaaatcacccctcatcgacaatttcaaaggcctcggtgtcaatcttgttttaggagatctatacgatcaccaaagtttggtga

SEQ ID NO: 20786 - DNA, 242 bp, Glycine max
  Clone ID: 700871174H1
gtactttcatgcattttactttaaaaaattcttttattcacttctttaccaatttcgtttcaatttctttctcaaaatttcatcttacgtggtagggcaaaatatggcattgatgagatgtgccgcgatcaatggaattgggctagcaaaaacccttatggctatggagatcaggaggattccagcgtttaactatatatatatatagtgatctctatgggtccttttccgaactcccccac

SEQ ID NO: 20787 - DNA, 149 bp, Glycine max
  Clone ID: 700871178H1
atcaaatcctaatgatatgactggggagactggtactcttggttatatggctccagaggttttaaatggcaacccctataacaggccatgtgatgtgtacagttttggcatctgcttatgggaaatatattgttgtgacatgccatatc

SEQ ID NO: 20788 - DNA, 152 bp, Glycine max
  Clone ID: 700871179H1
cagacctgatcagatatcagtctccttgtcttgatccaagtccatgtgaggagtcaacgaaatctcaaaatgaatggtttgattataagaagtttgtcaatgttgacttctcagttgataggcccatgcttattaatgaccaagctaactgc

SEQ ID NO: 20789 - DNA, 234 bp, Glycine max
  Clone ID: 700871180H1
ctcgagcgcagaaatttaaatggaatgtatagggtgggggcaacaatatcataaaaaatacttagttaaaaaaacgataatactgtattgctattgtattgcaattcgaaacgaaatctagttcgagatcattgtattatgattgtactatattaatcttaatcttaattggaacgaaatctttcaaaattggatttctaattcttaataattcttaacttatatcggcgcttt

SEQ ID NO: 20790 - DNA, 269 bp, Glycine max
  Clone ID: 700871181H1
atttcatccaagccctcttgtctcaacaaattaataataattaatcacgcccttcgatcttcgagtcatctaataataaatcttttgtttcccatcaacactagttcctgcaaattaatgggtatccctcactttctttgtataccatttccagttcaaggacatgtgaaccctcttatgcaattttctctgcttttggttaaacatggttgcaaggtcacttttgtacacactgagttcagcctcaaacgaacaaagacttctggtgc

SEQ ID NO: 20791 - DNA, 264 bp, Glycine max
  Clone ID: 700871182H1
gtttgagcaggattctaatgcccagattgggttctgctggggcattggcgttgatggttttgtagttatttttggaattctgggcgagcctgcaaaatcaagttgtgctaatatcatttgcaccatttccaactggttatgtaaatttgcaccatttctaagtttgtgctatagggtagtataaggtatctgctctagatcctgctttttgtatctagcactctcaaatttgtgtcggaaatgtgcaatttagagtacttatta

SEQ ID NO: 20792 - DNA, 241 bp, Glycine max
  Clone ID: 700871140H1
gataaacttaagaattcaattattgaaattgaataagtaaacaatttaattggattggtcgaatggtatcaaaaaaatggagtactaactcccatttcttatgtattattgaattaaccgatcaacttgctttgttatcgaacatttctttttgatttcaaaaattttccggaaaaaatttgaatctatttttatatgcgaatcaatcctactacttctggtcctgaggtttctgcgcttg

SEQ ID NO: 20793 - DNA, 245 bp, Glycine max
  Clone ID: 700871081H1
cggctcgagcccaccctacccggagcttcgttctggacattattctctcttctcttctcttctgtgctgtgcttaatttccagtttttgttttcagcaatggatgacgtcaaagacaaggtgaagggcttcatgaagaaagtcaacaaccctttctcttcttcctcatctgccaaattctagggccaaggtagagtccttggttcttcttcttctacacccgctaattttagtcctacccctcgc

SEQ ID NO: 20794 - DNA, 245 bp, Glycine max
  Clone ID: 700871084H1
ctcgagccgtgttccctccgtttttgaggtgctgaaatttaagggagggattactatcattccacaacagagtgtgttccctctgcaaacagtgcaaacattattcaactttactttgaatttctccatttatgaaatacaatcaaattttgatgagctgacaagtcagctaaagtctggactacatttggcaccttatgagaacttgtatgtcatattatcaaattctgaaggttctacagtag

SEQ ID NO: 20795 - DNA, 247 bp, Glycine max
  Clone ID: 700871085H1
ggcagatgccatggccagggccaaggtgtttgatatcgacctgcagaaacagttgaggccttacatggaatctatggttccactccccggaatctatgaccccgatttcattgctgccaaccaaggagaccgtgccaacaacgtgatcaagggcacaaagaaagaacaagttcaacaaatcatcaaagacattaaggagtttaaggaaagcactaaggttgacaaggtggttgtcctgtggacagcc

SEQ ID NO: 20796 - DNA, 99 bp, Glycine max
  Clone ID: 700871086H1
gtcacctgcctgctgtgctgcctgttttctgtgacgttgagatgtgtcctctctcttcatcccttctcttctttaccagaagattattccacacaacat

SEQ ID NO: 20797 - DNA, 240 bp, Glycine max
  Clone ID: 700871091H1
tatcccacattcagctttggttctttgttgctgggacagtgagaaaactttgccaaataatttttctgcagaattgctctcttgcaaattggatactgttactggccaatattatcctgagtgggctccaattaattgtcgagttcatcgacaaccaattcacatcactgaaggaaattatgtcagaaagcaagatgtcagcattgaatatgatgcatgtacaattccaaatgattgtgg

SEQ ID NO: 20798 - DNA, 245 bp, Glycine max
  Clone ID: 700871092H1
gactgtcccactgtgtgagactgaactgccccttattctacctgaattggatgatttttctcccactggaacaggggagcctcctctgtctaaggcagtgtcttgggtgaagaccacggatagcttatctggaagaccagctacccgtgaaactaataccatgccacagtgggctggttcatgctggtactatttgagatttatggacccacataattccaaggaattggttgataagacaaaag

SEQ ID NO: 20799 - DNA, 253 bp, Glycine max
  Clone ID: 700871095H1
ctccgagtctgtctttgttgcgtttcgagtgtctgtggaatccctaaccctaatttattgtgtggcgaaatgggatcaattggggtactcctggtggctcaggtgataccgtacctggagcaagagctggacaagcgctacaagctgtttcgggcgtatgatcagccgcagacggcgcaggttctaagccagcacgcgagctcgatccgtgcggtggtcggaaactcgaacgccggcgccgacgcggagctga

SEQ ID NO: 20800 - DNA, 250 bp, Glycine max
  Clone ID: 700871096H1
ctcgagccgaatcggctcgagaacaaatcagagtaattggaacttcaaacttgtcattcaatcatggcgattgaggcatggttgatggacgaaagcaatgaagatccaagactccctcaccgccgcaatcccaacaagtcagtgtcattggaccaattagcagaatttggggtgttatactggaagctgaatccaactatctatgagaacgatgaagagttggccagcatagaggagatagggataccac

SEQ ID NO: 20801 - DNA, 269 bp, Glycine max
  Clone ID: 700871101H1
ttgatttctcttgaccatgaccccctctaccaacacaaatcctcttctcctcttaattctgagcttcctccttctatccattcaatctatcaggtttaaccctgatggagagtttactattgtccagttcactgacttacacttctgtgaagaagctgaacaagatatgagaagtcagcaactccaaagaaatatccttgactgggtcaaacctgatctcgtcgtcatcagtggcgatggcgcttccgattatgctgacggctcataga

SEQ ID NO: 20802 - DNA, 260 bp, Glycine max
  Clone ID: 700871103H1
cttctctttcaatctcttttcgcgatgctcgtgttttcactgcaccaaaatgctctcccaccactcactttcctcatcggaatttggttccaactcgagcatcattcatcgctggttccccactgttgattcgaagaaatcatggaaggaatggtgcatgcaaagcaatgcctgtttcaataagatgtgagcaaagtacccaggaagggaacagtttagatgtgtggctaggccggctagccatggttgggtttgcagta

SEQ ID NO: 20803 - DNA, 254 bp, Glycine max
  Clone ID: 700871105H1
acaccccccacgaagcaccaattatggctctgaatcttcgtatctcacctaagtttaaatgggttccttccttagatagtgcttcctattctttgagaccttcacttgggtcttgttttggtaacataaacattgctagtgtgagtctaagtactactagaagtttgagtttgaggaggagtgggagtgttagtgtaagatctagtttagaaactgcggggcccacagtcacagtgggacaggtcactgaggtt

SEQ ID NO: 20804 - DNA, 257 bp, Glycine max
  Clone ID: 700871107H1
aaaagacttaaaaaggaggatttgaaatgcgagatctaaaaacatatctttccgtggcaccagtagtaagtactctatggttcggggctttggcgggtctcttgatagagatcaatcgtttttttccagatgcattgatattcccttttttttcattctagttattgacacggaaaggggtgaagaagattatagatccaattaagtattaaatatatgtaattaatatgtaattaatctcctcttctttatttcgt

SEQ ID NO: 20805 - DNA, 127 bp, Glycine max
  Clone ID: 700871111H1
caataagaacacgcaaacgcgaaggagctaagaggaagaggatgattgcgggttatgtttgattgatgtgttcagtgatcatcaatatgagaatgttgcctgtttgctcagccaccccacgttattc

SEQ ID NO: 20806 - DNA, 251 bp, Glycine max
  Clone ID: 700871114H1
ctcgagcgattcggctcaggcgattggccccaacaagaacctcttggagtatacttgagaaattgcttggttgcttactcattctatagaaatatttttccaatgtgggctttggctgaataccgcacaaatgttttattgccttcctttactatttaagttgaaaaattgtgagctcaaaaagataatgtcataccaataaaagtctagaaaaaaaaaagttggtaatgaaaaaaaaaaaaaaggggggg

SEQ ID NO: 20807 - DNA, 253 bp, Glycine max
  Clone ID: 700871115H1
caagagtggtctattttgatgcaaggatgcctgacaatgctcttgtcatcgctcaagaggcatttcaccagaatatatctatcttaattgatgcggaaaggcctagggaaggattgaatgacctcctgagtttggctgattatgttgtatgttcagaaaaatttccacaggcctggacagaggcatcatccattccaagagcactagtttcaattattttaagattgccaagacttaaatttgcgattgtaac

SEQ ID NO: 20808 - DNA, 254 bp, Glycine max
  Clone ID: 700871116H1
gtttctatccctcactaggagctcttctccattggttcttcatctgcatgcacacacttgcatagttttggaaaccaagaatttttgaagggtagcatcaacaagaagttctggaaatggagatcaccaatgtcagcgagtatgaagctattgcaaagcagaagttgccaaagatggtgtttgactactacgcatctggtgcagaggaccagtggactctgcaggagaacagaaatgccttttccagaattttg

SEQ ID NO: 20809 - DNA, 264 bp, Glycine max
  Clone ID: 700871117H1
tgatgatgttgtgtttgggggatgggatatcagtaacttgaacctggcagatgccatggccagggccaaggtgtttgatatcgacctgcagatacagttgaggccttacatggaatctatggttccactccccggaatctatgaccccgatttcattgctgccaaccaaggagaccgtgccaacaacgtgatcaagggcacacagacagaacaagttcaacaaatcatcatcgacattaaggagtttaaggatagcactaaggt

SEQ ID NO: 20810 - DNA, 255 bp, Glycine max
  Clone ID: 700871120H1
aagaaaagaaaatcctcatatttctgagcagccaaacactctctctctgtctctcgaaaattctcagtttgcagagaaaatctgaatcatgtcgtggcaagcgtatgtcgacgatcaccttctgtgtgacatcgaaggtaaccacctcactcacgctgctatcatcggccaagacggcagcgtttgggctcagagtaccgacttccctcagttcaaacctgaggagataactgccatcatgaatgactttaatga

SEQ ID NO: 20811 - DNA, 240 bp, Glycine max
  Clone ID: 700871123H1
gtgattagctgaaatttaacggtaatcactaatttttgtagatcccatatctaaattttagacaatattccagagcaaagtagagggttgtagaaggaagtttgagagcatttctcttgttttgaatttcttcgcttcttatttggcttgtagttatagaaaaacttgtagaatatcgattattatatgaataggaatatatataatttgtggtgcacgcattttatttgaactgcatgc

SEQ ID NO: 20812 - DNA, 250 bp, Glycine max
  Clone ID: 700871126H1
ctctcattcaacccacttccaccatcaacttcttccttttcttcaccccgtacattcacaaccctggctctcttcaaatctaagacaaaagccgctcctgctaagactaaggttacaaagccaaagcaaaaggttgaagatggtatctttggcacttctggaggatttggttttactaagcagaacgagctctttgtgggtcgtgttgctatgcttggttttgcagcatcattgttgggtgaaggaataa

SEQ ID NO: 20813 - DNA, 83 bp, Glycine max
  Clone ID: 700871128H1
ataccgaacactcttcttcaatcaagcgaaggtggtctcgattgcaagtgctccacgatacactctacgcttcacaaaacctt

SEQ ID NO: 20814 - DNA, 96 bp, Glycine max
  Clone ID: 700871130H1
gtgctttctaatgcactgatttacaatttacatgcttgttcatacaggatgtaatgccacgatagacatacactgtacttgttcagggaagttccc

SEQ ID NO: 20815 - DNA, 259 bp, Glycine max
  Clone ID: 700871132H1
ggcttatggtggatacctaggcacccagagacgaggaagggcgtagtaagcgacgaaatgcttcggggagttgaaaataagcgtagatccggggattcccgatataggtcaacctttcgaactgctgctgaatccacgggcaggcaagagacaacctggtgaactgaaacatcttagtagccagaggaaaagaaagcaaaagcgattcccgtagtagcggcgagcgaaatgggagcagcctaaaccgtgaaaacggggt

SEQ ID NO: 20816 - DNA, 169 bp, Glycine max
  Clone ID: 700871133H1
tgaagattccgcaacagagagtagacaagatggcgcggttgatcacagtggtgtggtgcgcggtggcggtgctactttgcgctcgcggcggtcgcgtcgttggtcgaggaggcggcgaacccgatacgaatgctggtcgtggtcgatgcggaggtggttcgggtgatag

SEQ ID NO: 20817 - DNA, 233 bp, Glycine max
  Clone ID: 700871136H1
atttgcaaactccacccaaccaaccaccttcttaattaatatccgtcgtcgtttcaatctcgtgacacacctcgatacgcatcggcacactcactagaatgcaagccgtttcgctctcacctttgtcgtttagggattcttccgacgagttcgctggaaagttcgaacacgatttcatggccaagctcaaaatcaacgaagagacagtcgaaaacgagtacgaagagaagcat

SEQ ID NO: 20818 - DNA, 248 bp, Glycine max
  Clone ID: 700871137H1
tcggggcgcgggaccctttccccgccgagcttgaaagctcgttcggggacaaagtgctgggatacggcaacactgagcacaagattcttattcccaccattactgctctcggtctctcgcagcaggagtgtgctcccgtttcttctgcgcaccccccatctcgctggatgacgcccagactctcattagaaaggttgtgggttggagacttgtgaatgaggaaaatggacttaaaattcaatgcttgt

SEQ ID NO: 20819 - DNA, 250 bp, Glycine max
  Clone ID: 700871139H1
atctcctcttaccgtggaagaacagataataactatttatactggaccgaatggttatcttgattcattagaaattggacaggtaaggaaatttcttgttgagttacgtgcttacttaaacacgaataaacctcaattcaaagaaatcatatcttctaccaagacattcactggggaagcagaagtccttttgaaggaagctattcaagaacagatggaactctttttactacaggaacaggtagaaaaa

SEQ ID NO: 20820 - DNA, 255 bp, Glycine max
  Clone ID: 700871080H1
ggctcgagccagaatgatatcagactccgggatccatgctttggccggtgcagctggcggtgccctgtccatggccgtgacatatccgctcgtcaatctatcgactcgcgcccaggtggagacaaagaaacagggcaacgagtcgacgcttggagcggttcgccggatcatacaggccgaagggatcgcaggcctctttgacgggctcgagtcgagcattgtgggcattgcagtcacgaacggtgtctactatct

SEQ ID NO: 20821 - DNA, 251 bp, Glycine max
  Clone ID: 700871044H1
tgcctgcaaattttcttcccctcaatctatattattcaggtggtgttcctgttcccctcaagcacccctgtgattcattcccaaaaagcttacaacatttcattcaattcaaattctaaatttaatttccatttcgtcttcgttttctgttttgatttgatcttccaatggcgtccgatcgcttcaccgacaagaacaccgtgttcagaacgctcaaggcgaagtccgaaaataagatgtgtttcgattgc

SEQ ID NO: 20822 - DNA, 254 bp, Glycine max
  Clone ID: 700871046H1
tggcaggtttgggaatatggatgggtttcgttagcctgtgtcttctgtctgtatcagtatcaggtctgctccaacgcctagagcaccctgtcaaagctgatggctcacttagccttatggtcattggagactggggaaggaaaggaacatacaaccaatctcaagttgccactcagatgggaagggttgctgcaaagttaaatatcgactttgtgatatccactggagacaatttctacgatgatggattgact

SEQ ID NO: 20823 - DNA, 260 bp, Glycine max
  Clone ID: 700871048H1
caaaaacaaacactttcttacttcataagatcaccttttcttcatcttctacttctccttcactaaaatgatgctcaaaatcaagagggttcccactgtcgtttccaacttccaaaaagacgacgctgcagactctcctcgtcccgtcggaggttgtggtcggaattgcctcaaagcttgttgcattccagatgcaaagctgcctttgtatggtttcaagaaggctaatattgggaaggatttggccctgcatgcatgcg

SEQ ID NO: 20824 - DNA, 251 bp, Glycine max
  Clone ID: 700871049H1
cgttgccattctcatcctcctctgtctctctctctccaccattgccatggattcttacaagctccggccatccagcgccttcaattctcccttctggactacaaattctggtgctcctgtttggaacaacaactcctctttaaccgttggagctagaggtccaattctgcttgaggattatcatcttgtggagaagcttgcaaactttgacagggaacgtatccctgaacgtgctgtccatgccaggggag

SEQ ID NO: 20825 - DNA, 248 bp, Glycine max
  Clone ID: 700871051H1
cggctcgagcggctcgagcggctcgagggatggttggatgagaagaccctctccccggccaaagcaggctacggaatggacgttgccatcaaaaagttgaaccccgaaagcacgcaaggcttccaagagtggcagtcagaagtgaactttttaggaaggctttctcaccccaacctggtcaagttgttgggttattgttgggacgatgatgagcttcttcttgtctatgaattcttgccaaagggaag

SEQ ID NO: 20826 - DNA, 249 bp, Glycine max
  Clone ID: 700871052H1
ccggaagagtccctccctcggtccgctccttctggaacctacgacactttaatttctccggcaaccgcttcctcgacccctctctacaatcatcctcaccagacacaattctctctagacgttttctatcagaagacggtgatggtgatgttcctgcacctgctcctgcacctaataactcacagaagaagaaatccaatgcttctactcatgctgctgctgctgcacctggtcctgcacctaaccata

SEQ ID NO: 20827 - DNA, 249 bp, Glycine max
  Clone ID: 700871053H1
ctcgagccgattttcttaaagaacaaaatgtttgttatgcttaatatctttaatttggtctgtatttgtattcactccgtcctttattcaagtagttttttctcggcgaaattgcccgaagcctacgctttcttgaatccaattgtggatattatgccagtaatacccttactcttttttcttttagcttttgtttggcaagctgctgtaagttttcgatgatatctgtaatttgagtaatgtcttaaa

SEQ ID NO: 20828 - DNA, 249 bp, Glycine max
  Clone ID: 700871054H1
ggagtgacatctgtacaataatgtatactagtggaactactggtgaccccaagggagtgttgatatcaaatgagagtattattactctcttagctggggttaagcgactgttggagagtgtaaatgaacaattgactgagaaggatgtatacatatcataccttccacttgcacatatatccgatagggtcattgaggagacattcatatggcatggtgcttcaataggtttctggcgtggggatgtca

SEQ ID NO: 20829 - DNA, 248 bp, Glycine max
  Clone ID: 700871055H1
atctcttgctactaatatctttcaaactacaccaatcggcgaggctagaagcgaaaaaatcgagtaggagagcatatatacatagatgatgtccgcaccagctaatttggagacggggggagaagagaagaaattagaaatagagagagagaaagaggtggagagtcaggtagaggtagcagatactgagtcaaagccatggaaagagcaaataacagtgagagggttggtggtgagcatggtgcttg

SEQ ID NO: 20830 - DNA, 248 bp, Glycine max
  Clone ID: 700871056H1
atttaaccgttggagctagaggtccaattctgcttgaggattaacatcttgtggagaagcttgcaaactttgacagggaacgtatcccagaacgtgttgtccatgccaggggagctagtgcaaagggtttctttgaggtcacacatgacatttctcacctgacatgtgcagatttccttcgagcccctggagttcagacgcctgtaattgttcgtttctcaactgtcattcatgagcgtggtagccct

SEQ ID NO: 20831 - DNA, 251 bp, Glycine max
  Clone ID: 700871058H1
cgaaggaggagagcgacttccggaacctgctggagaatgaactcgacaaattcaacaccttcttcgttgagaaggaggaagagtacattatcagactcaaggagttacaagatagtgtggcccaagttaagggttcgcgggaagagatgatgaaaatccacaaggaaattgtggatttccatggagagatggtcttgctggaaaactacagtgccctcaactatacagggctagtgaaaatacttaaaaag

SEQ ID NO: 20832 - DNA, 255 bp, Glycine max
  Clone ID: 700871061H1
agcgccccgaagaagtacgacgagatcgacgccgccccggaggaacgcgcccgcggcatcaccatcaacaccgccaccgtcgagtacgagaccgagaaccgccactacgcccacgtggactgccccggccacgccgactacgtcaagaacatgatcaccggcgccgcccagatggacggcgccatccttgtcgtctccggcgccgacggccccatgccccaaaccaaagaacacatcctcttagccaagcaagtc

SEQ ID NO: 20833 - DNA, 251 bp, Glycine max
  Clone ID: 700871063H1
aaatgaagccttagcaattgagtgaattgccattcattgattggtcgattgattgaggtattagttaagattcaaactcattgtaccatagtttgccttgtccctcctccattttttaaacattattccaccctcatttatgctcttaaatactcaagagccttgtgatgatctctagagtgaatttctcgtagattttaatcatagtatttgatttaaaggaaaggatttgtttccttctaataactcta

SEQ ID NO: 20834 - DNA, 260 bp, Glycine max
  Clone ID: 700871064H1
tgagactagaactcatagggaagaaaatagatttatgaatggaataaaatatgcagtatttacagacaaaagtattcggttattggggaaaaatcaatatacttttaatgtcgaatcgggattaactaggacagaaatcaagcattgggtcgaactcttctttgatgtcaaagtaatagctatgaatagtcatcgactcccggtaaagggtagaagagtacgacctattatgggacatacaatgcattacagacgtatga

SEQ ID NO: 20835 - DNA, 239 bp, Glycine max
  Clone ID: 700871065H1
aaaaattaatagtaaaggaaaatacaaaacatccaaaatatgatatcacgtgggtttctacttccatgctagccatcaattaagtttcaaaaattttaaaacaacattttgaataataatgaaaaagataccaagcaccgcaaataaaaaatactcagtataattataattttcccaaatttcctagtagtaaaactaaaattattaggtaaaacatccattcaaatgttttgactaaa

SEQ ID NO: 20836 - DNA, 246 bp, Glycine max
  Clone ID: 700871067H1
gacaggattctctcatcagccacgtcgatctttgacaacactggagttaagatgctcagtgaaggttgccggcattcactggcactatggtacaaggtctcacgccccagaactcactgcagggtattacaacacccgattccgtgatggctacctccccattgctcaaatgctggcgcgccacggtgccatctttaacttcacctgtatcgagatgcgcgatcacgagcagccacaagaggccct

SEQ ID NO: 20837 - DNA, 245 bp, Glycine max
  Clone ID: 700871068H1
aacggcaccgcgccgtagaagaaaacaaccatggtgcacgtctccttttacaggaactatgggaagacattcaagaagccgcgtcgtccgtacgagaaggagcgtctcgacgcggagttgaagctggttggtgagtacgggcttcggtgcaagagagagctgtggagggtgcagtacgcgctcagccgcatccgcaacaacgcgcggaacctcctcaccctcgacgagaagaacccgcgccggat

SEQ ID NO: 20838 - DNA, 248 bp, Glycine max
  Clone ID: 700871069H1
aaaatacaaaaacaactttgcaatttcgtaggagatgctcaggagcagcacgctaacacagagtgttacagtcacctgtgttcgtcacagtcacagacaatggttccaatcaattcccgtaaattatagattctttgacgctgctcggaactctctatcatcacccaactccgcgatcttcaaatggaaaagaaaggccaattataaccgtcatagttctggaatggggaccttcaccactcgcgcgt

SEQ ID NO: 20839 - DNA, 249 bp, Glycine max
  Clone ID: 700871070H1
attttgagaaaacaagacatcggactgttgtcacttcagatgttcggcagcaaatcatgacaataaataggaaagtaagggaagagtgggataaaaaacaggcagaagcagagaagattaggaaactaaatgatgttgacagcaatactggacttgatggtgacaaggagaaggacgacggccgtggtaaatcaataaaggtgaacaaggaagaggatgagaagatgaggacaaatgctgcaaatgttg

SEQ ID NO: 20840 - DNA, 249 bp, Glycine max
  Clone ID: 700871071H1
aaaatacaaaaacaactttgcaatttcgtaggagatgctcaggagcagcacgctaacacagagtgttacagtcacctgtgttcgtcacagtcacagacaatggttccaatcaattcccgtaaattatagattctttgacgctgctcggaactctctatcatcacccaactccgcgatcttcaaatggaaaagaaaggccaattataaccgtcatagttctggaatggggaccttcaccactcgcgcgtt

SEQ ID NO: 20841 - DNA, 248 bp, Glycine max
  Clone ID: 700871073H1
tggtgaatgccaccctcatgaacattgctgataaccccaccaatgtgcagcttcctggtatgtataacaaggaagagaatccccgtgtgcccatcatcgtcaccggtaacgatttctccacactctatgcgcctctcatccgtgatgggcgtatggagaagttctactgggcaccaacaagggatgaccgcattggtgtctgcactggaatttttcgcaccgattcaattcctgaacaggacgttgtc

SEQ ID NO: 20842 - DNA, 249 bp, Glycine max
  Clone ID: 700871074H1
tgtcttgcaattgaagttgaagtcttgcccttctctcttcaactccaaacacaagacatcatcatccatggctgcctccgtctccactgtcggagctgtcaacagagctcttttgaacctgaatgggtctggacctggggtttcagctcccagttcatccttctttgggagcagcttgaagaaggttattggctcaagggtccccaacacaaagatttcctctggaagcttcaagattgttgctgtaga

SEQ ID NO: 20843 - DNA, 249 bp, Glycine max
  Clone ID: 700871076H1
gagtcttctcagcaagttggattattcaaagacattaacagagatatggtgaacaataatgtgagagctattcctgaaacttcttatacacataacagagacattttatctggtggcatttctgctcctattaagatcaatgaaaagaattcaagaggagcaaagggacacaaggttgtttctgatttagtcaagcctattgacgtggttcctggatctgagcctgaaattcaggctcctccttttact

SEQ ID NO: 20844 - DNA, 250 bp, Glycine max
  Clone ID: 700871077H1
tggatacaaggtattcatatctattgctctgattttaggggatggcatttacaatctgataaagattatactgataaccattacggagatgtggagggcaagctccaaacagcttcctgttgtgacagaggttcaagatgatgagagttctcaactgcaatcagaagaaaagaggagggatgaagtattcttgaaggacaggatacccacctggtttgcagcctctggatatgtgggcttggctgcgata

SEQ ID NO: 20845 - DNA, 250 bp, Glycine max
  Clone ID: 700871043H1
aaaaattaatagtaaaggataatacgaaacatccacaatatgaactcacgtgggtttctacttccatgctagccatcaattaagtttcacaaattttaaaacaacattttgaataataatgacaaagataccaagcaccgcaaataaaaatactcagtataattattattttcccaaatttcctagtagtaagactaagaataataggtaaaacattcattcaaatgttattactagaaatattgaaggt

SEQ ID NO: 20846 - DNA, 242 bp, Glycine max
  Clone ID: 700871010H1
ctcttccttcctatcactgttttttcctgcaaagaaaacgtaaaggaaacgccttgtgcttcctctctctctctctctttattcattcattcattcactcacattcagaattctctactttttactcatagcttcgtagaggaagctgcttctacaagccaagtattatttggtgtcccttttctttctttcttttctttttcctttctctttctttcatagagctaaactaaactaaacca

SEQ ID NO: 20847 - DNA, 254 bp, Glycine max
  Clone ID: 700871011H1
ctttgccttctgcatgttggttctctgtaaacagatactgcaaaagaagaataatattgaatatttggttgggttgaatccctgggttgaagcgttgcagacatcacggctattctaagagtgtctcgctctctcattcatgtcccaactgtacgacggaggacaggttgcgtaactgccaccaacccttcgccgcacggtgggcgtggtgctttgccttctgaaggtggtagcccttcagacttgctcttctt

SEQ ID NO: 20848 - DNA, 253 bp, Glycine max
  Clone ID: 700871012H1
aaaacagcaacaaacgacagagattcttcctcaacacaatcgaaaaaaaaaaagcttccgattctaaaaccagaacaacaaaaaagtaaaacacacacgtcattttaaaacatttcatttttttggttatttatttaaagagcgagtgttgtaacaaatggtgaagccgaagagcgtggagaaacccgcagaggaacaacaacaacgaagtgtttcatcgtacagaggagtacggaagaggaagtgggggaag

SEQ ID NO: 20849 - DNA, 256 bp, Glycine max
  Clone ID: 700871014H1
gtttgggagaaatttgaccttgagattgctgctacacgaatgcctgagcaatatcaaaataaaatggtttggatcctgtgcaatgactgtggtaaaacttctcacgttcagttccattttgtggctcaaaagtgtccgaactgcaaatcctacaacacacgacaaacatgaggcggacaggtggccactatattcattggcttcatcaaaagccttcactcgagagctctcttgatgttgtcgtgacttgtgaagg

SEQ ID NO: 20850 - DNA, 263 bp, Glycine max
  Clone ID: 700871015H1
tcattctcatctttctctcttctctctccacccaaaccctaactcccgaccctgttcccctctcgtatccgtcatgaaaggaggaaagtccaagaccgaatctaagagagccgatcccaaacttgctgtgaataagaagggagccgccaccaaggctaggaaacccgccggcaaggggaaggcagcgaaagaccctaacaagccaaagaggcctccaagtgctttcttcgttttcatggaggagttcaggaaggtattcaaca

SEQ ID NO: 20851 - DNA, 265 bp, Glycine max
  Clone ID: 700871016H1
ggttagtgaatcatatggattgaagtttcctagagaatttgctcttctcctgaaacagctcttgtactttgaccggtacacacggttgctggctcccaacttgaacatgcttcaggatcagaggatttccattgcttccaatagcagaagcagggtatagagacaatttttaaggagttggtacacaaaatctagatgtaccccatcttagttcaaaatattttatttgtatgattactttggtatataaataaaataatccata

SEQ ID NO: 20852 - DNA, 274 bp, Glycine max
  Clone ID: 700871017H1
tacgtaatctcgctctactgctattctcatcctcctctgtctctctctctccaccattgccatggatccttacaagctccggccatccagcgccttcaattctcccttctggactacaaattctggtgctcctgtttggaacaacaactcctctttaaccgttggagctagaggtccaattctgcttgaggattatcatcttgtggagaagcttgcaaactttgacagggaacgtatcccagaacgtgttgtccatgccaggggagctagtgca

SEQ ID NO: 20853 - DNA, 183 bp, Glycine max
  Clone ID: 700871021H1
cttttcttaataatgaaaaacaatttgaaaaaagcgagtcaacacgctagaactactactttaagaaaaaaaaaatatagaaattaagaattctaaatccaattttgaattgagatttgaatgaaatattgattgatgttttgtttgaaaattacgacaattcaatttgggtttttatgttgt

SEQ ID NO: 20854 - DNA, 253 bp, Glycine max
  Clone ID: 700871022H1
gtcagggtgcacccattccatgttcttaggatcaacaagatgctttcgtgtgctggtgctgataggctccaaactggaatgagaggtgcttttggaaagccacagggtacttgtgctagagtggctattggacaggtccttctttctgtccgctgcaaggacagcaacagccatcatgctcaggaggctcttcgccgtgccaagttcaagttccctggtcgtcaaaagattatagttagcaggaaatggggct

SEQ ID NO: 20855 - DNA, 253 bp, Glycine max
  Clone ID: 700871024H1
cccgcggatacttcgtatggcggtgatctcttcgatgcttcaaatgattacgttgaatggttggactcacagcctgagttatctgcggtttatgtttcatttggtacccttgctgtgttggctgatagacagatgaaggagcttgcacgcgcgctgctagattccggatatctcttcttgtgggtcattagagatacgcaaggaatagaagataactgcagagaggaactggagcagaggggtggaggttctg

SEQ ID NO: 20856 - DNA, 254 bp, Glycine max
  Clone ID: 700871025H1
cttgtgatcatcacttgcaaaatttaaaataggttaaatatattctttaataaacataaaacaataaattagtctctaaaattggcataattatttattttgattcctttgtaacaaaatagagtaaatttagtttgtaattttgacaaccatccattagccaatttggtcttaaatgcactttaatgttaaaggaaaaatttacttatacatagcaacgtcaacaaccaaattgattaatatttgtttaaatt

SEQ ID NO: 20857 - DNA, 252 bp, Glycine max
  Clone ID: 700871026H1
gtggatcctgaaaaagtgatacgtctaagtttaagtgagcaacagcttgaaaaggctgctataaattatggacaacaaattgtcaggtttactcagcggaatatactgagggtgtatccaaaaggtactcgcattgactcatcaaattataacccattaattgggtggatgcatggagctcagatggttgcatttaatatgcaggggtatgggagatctctttggttgatgcatggaatgttcagagccaat

SEQ ID NO: 20858 - DNA, 253 bp, Glycine max
  Clone ID: 700871027H1
atcaatgtcatctacacaacttctggcgtaatgccaaggtttcttttcttaatttggcttgtataaaaataaaaatatttagtgcatttaactaaggggacgtttggcaggaaagcactttttcatgttgggaaatcaagaatcttgagaatcatatttcttggaaaaaaaaaaaaaaaaaaaaaaaaaaaaaaaaaaaaagggggggccccccaattgttgccctcgtcccccgggatttttttccggggcg

SEQ ID NO: 20859 - DNA, 223 bp, Glycine max
  Clone ID: 700871028H1
atcaatgtcatctacacaacttctggcgtaatgccaaggtttcttttcttaatttggcttgtataaaaataaaaatatttagtgcatttaactatggggacgtttggcaggaaagcactttttcatgttgggaaatcaagaatcttgagaatcatatttcttggaaaaaaaaaaaaaaaaaaaaaaagcgcaaaaaaaaatgggggccccgcgccatgagcat

SEQ ID NO: 20860 - DNA, 257 bp, Glycine max
  Clone ID: 700871029H1
ctggtagaaaattggtggtggattgtactggagagggtgtcatgttcattgaggctgatgcagatgcaacacttgatcaattgggtgacacacttcaacctccattcccatgcttcgaacaactcctttatgatgttccaggctcggagggagttattgactgtcccctaatgctctttcaggtgacacgtttcaagtgtggtggttttgccctagccgttcgcttgaaccacactatgagcgacggagccggcata

SEQ ID NO: 20861 - DNA, 260 bp, Glycine max
  Clone ID: 700871030H1
caagaaaagactactctacaaaatcctcctcttcatgatcagatgctggatccagattactcggaagctcaacaagctcaacattcagcttcaaagtcaccagctgccattttatcagattctgagagtggagatgccaagttaaatacttcatcaaaggctactgatcatgagacgaacaaaacaattcccgagcacctagattccaacaaaacaaagggccgaaaaccggttgaccgttcctcatgtggttcccacac

SEQ ID NO: 20862 - DNA, 261 bp, Glycine max
  Clone ID: 700871032H1
gttaccatggtcctttttccatctcttgtgaatggattggtaagaactgtgtcaatcaagaaggagaagaattgtcaaagggaggacggaagaaaagctgtggaagaattggcaaaggaagcaaggaagaatgaattgctattgagttcatctggagttgtgaagtcaaccaaggccaacaattttgtttctgtgttcactaataggggccagaaaggagtcaatcaggatcgtcttcttgtttgggaggaattggttgcc

SEQ ID NO: 20863 - DNA, 255 bp, Glycine max
  Clone ID: 700871033H1
ccttcccatggtctctctctcttcaattaattacatttagctttccccaaatcccaaaccctttttcgcttagatcccaatccaattgggttatggacatggcttccagtccccgcaccgtagaagagatcttcaaggattacagcgccagaagaacctctgttattcgcgctctcactcacgacgttgatgaattttacggcctctgtgatccagataaggataacctgtgcctctatggacatccaaatgagg

SEQ ID NO: 20864 - DNA, 245 bp, Glycine max
  Clone ID: 700871037H1
ctggttttaatggtacaggttattgtgaggaggatgctattcctcatatatctagctacctaccaagtatctgccctcctccttctgctttcttaggcccaaaatgtgcactttgggactgtccaaggcctgcacaagggttggactggtgtcaagattattgcagtagctttcatgctgccctagctctgaatgaagggccaccaggcatggccccagttctacgacctgggggcattgggttg

SEQ ID NO: 20865 - DNA, 252 bp, Glycine max
  Clone ID: 700871038H1
gttggtggtgggactggagctgtaatcaacatgattgtctcaaagcatcccactattaagggcattaattttgatttgcctcatgtcattgaagatgccccatcttatcctggagtggagcatgtaggtggagatatgttcccgagtgttccgaaagctgatgctatttttatgaagtggatttgccacgattggagtgatgagcactgcttgaagtttttgaagaactgctacgaggcactaccagacaat

SEQ ID NO: 20866 - DNA, 253 bp, Glycine max
  Clone ID: 700871039H1
caccgcacccggccatgtcagccactgcatttctgcagaaggcagcacaaatgggtgctgctgccacaaacgcctcccttcttcgcgggcttggcattgtgtcatcgtcacctttggattccacctcgtcgggacagcaaaatgtcctgcaatggggccaccaacagcagttggaacccgagagtggctcggtcgctgcagcagggctaggacttggtcttccatgtgaagatggtggttctggactaaagga

SEQ ID NO: 20867 - DNA, 253 bp, Glycine max
  Clone ID: 700871040H1
gccagttctgatatttacaccatctgctctcaagactgtgaattatggaatcctgcttgcacaaaagcaatgactatgtcatttaatccaaacccgtgttctgatgcatggagtttggaatttctgaagcgtaccggatttcattgtgatatcatttgtgtcactggatggactgccactccaatgcaggatgttcatgttacaattgattggtttatttcctctcaggaatgtgttcccaggacttattgtg

SEQ ID NO: 20868 - DNA, 251 bp, Glycine max
  Clone ID: 700871041H1
ggcggggctaccgtgagtttaagcatatcaataagcggaggaaaagaaactaacaaggattcccttagtaacggcgagcgaaccgggaaaagcccaccatgaaaatcggtcgccctcggcgtccgaattgtagtctggagaagcgtcctcagtggcggaccgggcccaagtcccctggaagggggcgccagagagggtgagagccccgtcgtgcccggaccctgtcgcaccacgaggcgctgtcggcgagt

SEQ ID NO: 20869 - DNA, 252 bp, Glycine max
  Clone ID: 700871042H1
cttccgttccttctttctttatcatcaccagtgttccatatttcatagaaaatggctttatcatctccctctctagtgttcaccgtacagaggtgtcaaccggagctggtggctcctgctaaacccactcctcgcgaagttaaacccctctccgacatagatgaccaacagggcttgcgtttccaaattccattcatactattctatggtaatgaaccatcaatggcagggaaagaccctgctaaggtcatt

SEQ ID NO: 20870 - DNA, 256 bp, Glycine max
  Clone ID: 700871007H1
tcattctcatctttctctcttctctctccacccaaaccctaactcccgaccctgttcccctctcgtatccgtcatgaaaggaggaaagtccaagaccgaatctaagagagccgaacccaaacttgctgtgaataagaagggagccgccaccaaggctaggaaacccgccggcaaggggaaggcagcgaaagaccctaacaagccaaagaggcctccaagtgctttcttcgttttcatggaggagttcaggaaggta

SEQ ID NO: 20871 - DNA, 85 bp, Glycine max
  Clone ID: 700870967H1
agaagatgctaagtttgagatgatcttactatatttttcatattggaccgtcttcctctataattttgagttacagtgtccactt

SEQ ID NO: 20872 - DNA, 234 bp, Glycine max
  Clone ID: 700870969H1
gctttctcatggctactacctttaccctcgcaacgctgtcactaccgtcgtcttctcgtgtttccattggcggagctccgattcgccaccaccgttctccgaaccggatcgggttgttgccgcctctcaaatgctcctctttggagccggaaaccgccccgcctcctcccttcgactggactcacaagttgatcgccggtgtcgccggcgtcggattcctcgaaacctcgtacc

SEQ ID NO: 20873 - DNA, 231 bp, Glycine max
  Clone ID: 700870970H1
ctcaactttccttcattttctctcttcctctcaccgagtcacgcactcggcttgactcgtacgaactccgatccccccccgagtcacactcaaccagcaccaccgcccgatccgacgatgtctcgcgcctcctccgccgcagattccgccgcctccggtgagatcatactgttcggagtcagagtcgtcgtcgattccatgaggaagagcgtcacatgagcaacctctcac

SEQ ID NO: 20874 - DNA, 230 bp, Glycine max
  Clone ID: 700870971H1
gcttcctcgaagcgtgttgatgcggcacagtcccctaccgtcccgcacccacaagcttggcggtgttcgacatcaacaccatcgaggagccatggctgaagcacctcaacaataccatcgaggagccatggctgaagcacctcaacaacaccacccctctcccccaagacaataataaaccctccctccccgcccctattctccacaactcaacttgctcgacgccaccg

SEQ ID NO: 20875 - DNA, 230 bp, Glycine max
  Clone ID: 700870972H1
tcgagggcgacggcaaacatgaggaaagccgatgcatcgatgcgctcgagcagctcaagaagtttcccgttaattacaagattctcgtcaacacccaggtgggtaaacatccttaaagttttgacaaagcacccgaggctgaaaattaaggcctttgctattgacctaattgagatatggaaaggcataattatcaaggaaacaacaaaaataaaaatgggggctctgat

SEQ ID NO: 20876 - DNA, 228 bp, Glycine max
  Clone ID: 700870973H1
gaagaagttgttgggttgagttgggtttggattggatttctaatctaatctatacctttctttttcctatgcttttaaggcacaaatccttctcccttctctcttctttcttcttctgctcctgacccttattattattccttgcccttaccctttaggcaagggaaggaagaaagaataactatatgattatcattattgtaatctactttttatgataattatgat

SEQ ID NO: 20877 - DNA, 228 bp, Glycine max
  unsure at all n locations
  Clone ID: 700870974H1
aacacaatccccttccctcttctctttctatccaaattctccaccagccatggcagtttcttcagcaacagcttcctccaaactcatactattcgcccatgaatcatcatcctcttcccttaattccacacacttcaggtaataggancagcaacacgcacaaactaacccctctctgctcctccttcctccagcccaccaccgtgctcgccgcaccccttcttcaca

SEQ ID NO: 20878 - DNA, 233 bp, Glycine max
  Clone ID: 700870975H1
tttggccactggctcttttgttcaagctgtgcttgctgatgccaaatctatcaaagttggaccacctcccccaccttctggtggattgcctggaacgttgaactcagatgaagcaagagaccttcagctgccattgaaagataggttcttccttcaaccattgtctcctactgaggctgcacaaagggcaaaggaatcagccaaggagttgttggtgttaagaagttgattga

SEQ ID NO: 20879 - DNA, 235 bp, Glycine max
  Clone ID: 700870977H1
tttttgacctaatgggttccggaaaattgaaagatgcttcccaaaacagttacagaatcaattttaatttgcatctctcgtgttggcgtgatctccaaagggacctctgtttttcgtggagtctcaatgaaatttagtatttgttttgggaagtggtattggataaagaatagcgttaacagtatgattatgttatcttatttttgggggagtttgggggattgtatgggcctgt

SEQ ID NO: 20880 - DNA, 65 bp, Glycine max
  Clone ID: 700870979H1
cgttacaaaaaatgcattatattgctttgaatcgaagtttactttggtggtagttgaacgagttt

SEQ ID NO: 20881 - DNA, 241 bp, Glycine max
  Clone ID: 700870980H1
gaaagattttatccaattgaaattttagaaatgactgggataaacttaagaattcaattattgaaattgaataagtaaacaatttaattggattggtcgaatggtatcaaaaaaatggagtactaactcccatttcttatttattattgaattaaccgatcaacttgctttgttatcgaacatttctttttgatttcaaaaattttccggaaaaaattgaatctatttttatatgcgaatc

SEQ ID NO: 20882 - DNA, 238 bp, Glycine max
  Clone ID: 700870981H1
gttggatcttaaaatttctcaacttaatattgcttttcccaaaaacacagttggaggaaccattctgcgtagtgatctattggcaaattttttgacagagggcaattttagagcaagtgttgatttgcagcgcactcatcgtattaaaggaatgattaaaatggtggccacagttggtattcctgagaatacaggtatagcattggcctgtgtatgaatagttcttttagggggcgtg

SEQ ID NO: 20883 - DNA, 237 bp, Glycine max
  Clone ID: 700870982H1
ctgagaagcacttccatttccactcctatctcttcctccaaatccaaacccattttctcaactcttgttcgttcatttttcgcctccatttcccccacaaagtgtgttactcccaccactcttttcgtttctgccacccccttcttcaccgcctcacccaagcgcggctttcgtggtgggattgtggccatggccgccgctggctcgctcccaaatcagaggaagagtggcgcgcat

SEQ ID NO: 20884 - DNA, 236 bp, Glycine max
  Clone ID: 700870983H1
ttggcatcgcttctcctctctcccaagaaagaatcatcaatggcgattgaacacgaagacgatctcaaagacgagaagaaccctcgacctctcgacgaggatgacatcgccctactcaagacctacggtttgggactttactccacaagcataaaaaaggcggagaaggaaatcaaagatatggccaagaaagtgaatgacttatgtggtataaaggagtctgatactggtttagc

SEQ ID NO: 20885 - DNA, 220 bp, Glycine max
  Clone ID: 700870985H1
aagaaggccttctacaatcatgggcgctaaaggggttgcttgtcatggtatatgcatgtgtagaatcaaattataattagatgaagatacatcatctatatgcaagcgatcatttctgctctatgcatcccctgtactgtcttatagctaacatctccctgacttttatgtagttcagaatgtaaaatacatgtccgttatcatgtaagcgtgataaatg

SEQ ID NO: 20886 - DNA, 226 bp, Glycine max
  Clone ID: 700870986H1
caacacactatggatgtttggtcatggatatgtgagctccccaactcggtggaggggaccgagtcccactcgccatccatgaagttcgaaatcgcgagtgagaagaacgacgacaagctggacaactcaactcgttccattcacctgaaagctgagcgaacctccggctcagactcggaagctgcggtgatcttcaccgtatgcttgcaaggctttcacccacaca

SEQ ID NO: 20887 - DNA, 231 bp, Glycine max
  Clone ID: 700870987H1
gccaaagagcatatctattatcggctggtccagttccttgtcataattcttgcaatacttgtgatagttggtttgctggaattcactaaattcaaattcatggatattttctctagcctgttggcattcatacccacgggctggggcctgatatcgattgcccaagtattccggccgtttttgcagtccactatcatttgggatgggttgtttcagtggctcgtatatatg

SEQ ID NO: 20888 - DNA, 231 bp, Glycine max
  Clone ID: 700870988H1
gctcattaaagggtttgaatctgctctcagtacattggaggatgctgttaatgatgctcccagagcagcagagtttcttggccgaatttttgcaaaagccataacagagaatgtagtttctttgaaggagattgggcagttaatacatgatggtggagaggagccaggtagtctcttagaagttggacttgcagctgatgttcttgaagcactttggaggtaattcaaagc

SEQ ID NO: 20889 - DNA, 109 bp, Glycine max
  Clone ID: 700870989H1
ggcgccgccatgatccgcaccaagggcgaggtcggcaccggcatcatcatcgaggccgttcgccacgtgcgttccgtcatgagcgacattagggttccacacaacatac

SEQ ID NO: 20890 - DNA, 231 bp, Glycine max
  Clone ID: 700870991H1
gaaggagctcaatggactgggatagtaacaaccattgcaatagaaatgcttaaatcaggcatggtggaggctgtcatttgtgtacaaagtgatcctgatgatagatttgctccaagacctgttttagcaaggacaccagaagaggtgttggctgctaaaggtgtcaagccaacattgtcacctaacctcaatactctcgcacttgttgaggctgcaggtgtcaagcgcctt

SEQ ID NO: 20891 - DNA, 218 bp, Glycine max
  Clone ID: 700870992H1
ggctcgaggcctattggaggcaacattatggctcatgccacaactacgagtgtagctctcaggaaagggacaggggaagagcggatctgtaaagtgataagttctccttgcttagcggaagccgaagcaaggtttcagatttgtgcagaaggagtttcagatgttaaagactaactgatttcagaatgtttgaatttttgttttcctatttgcatatc

SEQ ID NO: 20892 - DNA, 236 bp, Glycine max
  Clone ID: 700870994H1
cgcggcttcaaccttgtagttattctctttcttcttttttagctatccctctcttgaaaaatctagatctcgttcttccttgatctacgttacgcttttagtgaccggatctgtatggatctgaaccagatctacacgccgatggtggttttggcctggtctttcatagatctgatgcatggaggctcagatctactgtacagaggtgtggattcatgttcgtctctcttttggaa

SEQ ID NO: 20893 - DNA, 239 bp, Glycine max
  Clone ID: 700870995H1
gttgaagccattgaggtgggttaccgtcattttgacactgctgcagtgtatggaacagaggaagccataggcctagccgtggccaaagccatagacaaaggccttataaagagtagagatgaagttttcatcacttcaaagccttggaacacagatgcacaccgtgaccttattgtcccagctcttaagaccacattaaagaagctggggacgggtatgtggatctttatctgattcat

SEQ ID NO: 20894 - DNA, 244 bp, Glycine max
  Clone ID: 700870996H1
atggtccagattagtaccacaaaaatggagaaatagaataactgaatatcgtatagctcaaaataaagatttaaccaaatgcaattcatatgaaaaaagccaattaattctttacaaagaacaacaagtaaacgagttaaaaaaaaaaattagaaaacaatatagatacgatcttttatcctataattttatcaattatgcagataagaaagactcaatatttatggatatagatccctatttc

SEQ ID NO: 20895 - DNA, 262 bp, Glycine max
  Clone ID: 700871002H1
gctcgaagtccttctccagcgcgactttctacatcgtgatgcaatgcttgggtgctatttgtggcgctggcgtggtgaagggtttcgaggggaaaacaaaatacggtgcgttgaatggtggtgccaactttgttgcccctggttacaccaagggtgatggtcttggtgctgagattgttggcactttcatccttgtttacaccgttttctccgccaccgatgccaaacgtagcgccagagactcccacgtccccattttggc

SEQ ID NO: 20896 - DNA, 250 bp, Glycine max
  Clone ID: 700871004H1
gaacaaaggaaaatcccctcttagatccaatccaaattaatatttgtacatctagtcaagacccaagtccaacgcgtggtcgatcgaatttctcatttggggttctcttttttatttttgatcagctcattaggggttctcaatggatgcttcatcttcctcgtcgagtcaacctgaattcgattacttgttcaagcttctcttgattggggattctggggttggcaaaagcaccctgcttttgagcttc

SEQ ID NO: 20897 - DNA, 252 bp, Glycine max
  Clone ID: 700871006H1
gttggtggtgggactggacctgtaatcaacatgattgtctcaaagcatcccactattaagggcattaattttgatttgcctcatgtcattgaagatgccccatcttatcctggagtggagcatgtaggtggagatatgtgtccgagtgttccgaaagctgatgctatttttatgaagtggatttgccacgattggagtgatgagcactgcttgaagtttttgaagaactgctacgaggcactaccagacaat

SEQ ID NO: 20898 - DNA, 254 bp, Glycine max
  unsure at all n locations
  Clone ID: 700870964H1
aggaggtagatagttcacagctacaggtcgaggaaatgtacaaagaagaatttggtgattctgagatgagcagcaatctattatcatgcagagaaaacactcaaagctcgaagagatgatgttcaagcttctgacaataaaagggaatggtcncaggacaacttaataaacgttgatgatagtgttcagcatcatgggttgaagttagatcatgcctcggaattggacgaggtcagagcgttttgatcatggag

SEQ ID NO: 20899 - DNA, 240 bp, Glycine max
  Clone ID: 700870927H1
tgtgagtgcatggtcaccactaggagcttacaaaagtgctcaaggtacaaatgcagttatggagagcccaatccttaaggaaattgcttgtgaacgacagaagagcatggctcagattgcactaagatggatatatgagcaaggggcaattgcaattgtgaaaagcttcaacaaggagaggatgaaacaaaaccttgacatatttgactgggaatgagccaagaggaatcacagaaattc

SEQ ID NO: 20900 - DNA, 242 bp, Glycine max
  Clone ID: 700870928H1
cgatcaacttgctttgttatcgaacatttctttttgatttcaaaaattttccggaaaaaatttgaatctatttttatatgcgaatcaatcctactacttctggtcctgaggtttctgcgcttgaaaaaaaaaatctgggacgtatcgcccaaataatcggtccggtactagatgtagcttttcccccaggtccgatgcctaatatttacaacgctctgatagttaagggtcgagatactgtt

SEQ ID NO: 20901 - DNA, 242 bp, Glycine max
  Clone ID: 700870929H1
tgaattctatcatgtttcctgtcatggataaaattatcaaagctttgtgtgatatggctaaagataatgcacatgttcctatgctttcccgcactcatggacagccagcttcaccaactactttgggaaaggaaatggcgatctttgctgcaagattaagcagagaaaggaaggatctgtctcaggttgagatagtggggaaatttgctggtgcggtggaaattacaatgcacatattgttg

SEQ ID NO: 20902 - DNA, 252 bp, Glycine max
  Clone ID: 700870930H1
tcggctcgagttcgaatatattccattctctctgtgtatttccctacctctcccttcatggttagtcgatttcttctgtctttgctcttcgctctttccatgaattgtgtatgttctttgatcaatacgatgttgatttgattgtgttttgtttggtctcatcgatcttcaattttcataatcagattcagcttttattatctttacaacaacgtcctccatttgatattctgtaatcgtagatttgctcta

SEQ ID NO: 20903 - DNA, 278 bp, Glycine max
  Clone ID: 700870931H1
catgcacgagagatcggagctccggctcgagcaccatgaatactagtacgagtgtcaggggttgtaagtgctgtaatgggaggattcatgatatgcatcataatttgttgttttagatacaagttcttaatccaaccaatcaaactttgttcgaccacaaagagtgatcaagacattgaagcattcttaaaaaataaaggagctgtagcacaaaaaagatacaaattttcagaagtcaagaaaatgaccaatcctttaaagttaaactgggtcaaggg

SEQ ID NO: 20904 - DNA, 206 bp, Glycine max
  Clone ID: 700870933H1
gaaaaagaaaaaataataataatttttatccgggcaaatggtgactgcattcctaattgtacaaaactacaaaggaagaaagtctttggaagtggaatggacccggtgagatagctgttacagggtgctatgaaaagcacgtgtcatttacttttttttttaatctttctttgcacataataagctcagtttggttcttcctttgt

SEQ ID NO: 20905 - DNA, 240 bp, Glycine max
  Clone ID: 700870935H1
cagaaaaacaagtagttgagaactaagaagaaggaaatggcttcctcaatgatctcctccccagctgttaccaccgtcaaccgtgccggtgccggcatggttgctccattcaccggcctcaaatccatggctggcttccccacgaggaagaccaacaatgacattacctccattgctagcaacggtggaagagtacaatgcatgcaggtgtggcaccaattggcaagaagaagctcgaga

SEQ ID NO: 20906 - DNA, 218 bp, Glycine max
  Clone ID: 700870937H1
attaatttgtccagcgagctaacttatctgacattacctttgtatgtaatgcctgcatataatgttgatgagtcaagagcagaactacagcatgctagtcatgatgttgtctcaggtagcatgcagattgagtcttctgccatggtacagttgcaagcagacccaagtgcagcagagcattatgagactacagtagctcccatgggatacagctctga

SEQ ID NO: 20907 - DNA, 234 bp, Glycine max
  Clone ID: 700870939H1
gccccaaatctggggttagggtttcctctgcgtcgatggcttcgaattcgatcgacggcgacgcgttacggggtcgggactgtgcataaacgacgtgttaagggacgacgagctgcgttccattctggggcgagtggagagcgagaaggacaaggaaacgttcgggttggtctgcaagcgatggcttcggttgcagagcacggaaaggagaaactcgccgcacgtgcgggtccc

SEQ ID NO: 20908 - DNA, 237 bp, Glycine max
  Clone ID: 700870940H1
ggagaccaagaccaagtccactggcaagaccctcctcgaggccatcgatgccatcgacccacctcagcgaccaactgagaagcctctccgtctcccactccaggacgtgtacaagattggtggtattggcacggtcccagtcggtcgtgtcgagaccggtatcattaaggccggtatggtcgtcaccttcgccccagctggtgtcaccaccaagtcaagtccgtcgagatgcaccac

SEQ ID NO: 20909 - DNA, 189 bp, Glycine max
  Clone ID: 700870941H1
cttctaagagtgtgtttgtgtctccttttaaaatccatttaaacaccgatccaggcttacggcccagtcacgttgaggcgcatacgacagcgtgccaagggcgaacccaacatactctaagtggacttggggactgatttaggctaagtgcattgtgcgcagatgtatgatacagcctaaggattggct

SEQ ID NO: 20910 - DNA, 238 bp, Glycine max
  Clone ID: 700870943H1
cagaaaaacaagtagttgagaactaagaagacggaaatggcttcctcaatgatctcctccccagctgttaccaccgtcaaccgtgccggtgccggcatggttgctccattcaccgacctcaaatccatggctggcttccccacgaggaagactcaacaatgacattacctccattgctagcaacggtggaagagtacaatgcatgcaggtgtggccaccaattggcaagaagaagttc

SEQ ID NO: 20911 - DNA, 237 bp, Glycine max
  Clone ID: 700870944H1
gcacaattgaatctggaaactggaattcccctttatgaagcggagctcttcttctgtttttcatcctcttcaccctgctaggagccattggaggtttaggtgaccgtggaaaatttgttgatgacgaacctactactggaggtgttattcctccaggcaaaggcttcagggaagctcttggtcttggtccaggtcctttatttggattcacaaagcaaacgagctatttgtgggaag

SEQ ID NO: 20912 - DNA, 241 bp, Glycine max
  Clone ID: 700870945H1
cgtgcgtgcgattcttctgatattccaaggcgacgcaccgacaccggacccatctccggcgacatctcaccgatctccggcgaatccccggtccccactttcttccctcgaaatgaatcccgagtatgattatctgttcaagctccttcttattggagactctggtgttggtaaatcatgccttcttctgagatttgctgatgattcgtacatcgagagctacataagcaccattggagtt

SEQ ID NO: 20913 - DNA, 241 bp, Glycine max
  Clone ID: 700870946H1
caagagctgatctttctgctattgaaacccaggttcggaatttggttgagggcttgaagagctctgatgttgatactcagagagaggcaacagcagaactccgccttcttgctaagcacaatatggataatcgaattgcgattgcaaactgtggagccattaatgtattagttgatttacttcaatcaactgatacaacaatccaagaaaatgctgttactgcacttctaaacttatcaat

SEQ ID NO: 20914 - DNA, 258 bp, Glycine max
  Clone ID: 700870948H1
atcgagctgcgagaagaagagggaatgaagaagaaggaaataatggtgatggttccgtatccggcacagggacacgttagtcccatgcaaaagctaggctgggaatttgtgaggcaggggttcgaggctgtgattgtgatccccaaatttattcacaggcagatagcagagcttcagaaaaatgatgagaatgagatgataaagtgggtggctctgccagatcatgaagaagagaaggaagcaacccaccagaagatt

SEQ ID NO: 20915 - DNA, 241 bp, Glycine max
  Clone ID: 700870950H1
aaattttataaggttgtttcggaaagcacatgaagagaatatcaaacaagcagagttagagaagaagaaagctgagaaagaggctgaaatggagaaggcaaagggcattaacttgacaaagaagggggcaaaagatagttgacgactgtgttttctgctcctttgcatcaacatgaagctcttgccaaagagcaggaatgtaccccgcgtaagggaatgcttctgagaccacttaagaagc

SEQ ID NO: 20916 - DNA, 187 bp, Glycine max
  Clone ID: 700870952H1
cccaaaatgaactgagccaaacacgaacacccattctaccaaaacagccaccatcggacatcgaggccagcaaaaacagttttaggagcaaagaactcaggaacagatatgactactagacgtgttcgttattcccctcttgacagagatgaggatgtttatagcggtgacgttagacctttgaacc

SEQ ID NO: 20917 - DNA, 232 bp, Glycine max
  Clone ID: 700870953H1
ctacaagagaagaaaaaaaaaaagagagaaaagaaaaaatttgttttataactttttaacttattgttcacttcttcttcttcttcttcttcaatatcttggttctttgatattattctattgagcaaaaaatgggagttccagagagagaccctcttgcacaattgagtttgcctcctgggtttaggttttaccccacagatgaggacttttggttcagtacctttgccgc

SEQ ID NO: 20918 - DNA, 234 bp, Glycine max
  Clone ID: 700870954H1
gcatcaccaaaacaagtgtccctcttctttgttggccacaaaagcaacccaacaacaattcatcctcacactcacacccttctgactccatcacccaaacaagacccacaaaaccataatcagtggtggggccaccccaaaaccatcaaacccagtttcaatcacagtaggatcaggttcaacaccttgcacactggttccaccgaagacaagttgaaacgggtgaggttgaag

SEQ ID NO: 20919 - DNA, 235 bp, Glycine max
  Clone ID: 700870956H1
gtttgaatttgttagtgcaccggctatggaagaggttttggagtcatctgctgagcaggttgttgccacacttggtggagttcatcctgagtctgttcagtttttcaccccaactgcacagagactgatcgaagaacaaggaacaagtgcccttgcagctgcactcgcacaactgagtggattttcccgaccaccatcatcccggtctctatcacccatgaacagggatggatta

SEQ ID NO: 20920 - DNA, 234 bp, Glycine max
  Clone ID: 700870958H1
gggaggttcaagtggattatcgtgttcttcgcgctaccccttgatattctcgccataggattgatgatacacttccgtcagccaggtacggacgttgggttcatcatcatgacgcagatcttcaccgccgtggcaggaggtagcatcgttatcggcggcgaactggctatgatggctccgtcagaccatcaacacatggccgtcattacgcggtgcttaatctcttctgctcta

SEQ ID NO: 20921 - DNA, 236 bp, Glycine max
  Clone ID: 700870959H1
cagaattctctaaaagagatctttttctgctctttgaagaaagaagggtctttgcttgattttggagatgtctctgctctcagatctcatcaaccttaacctctccgataccaccgagaaggtgatcgcagagtacatatggatcggtggatcaggaatggacctgaggagcaaagcaaggactctcccaggaccagttagcgaccctgagagcttcccaagtggaactatgatgg

SEQ ID NO: 20922 - DNA, 237 bp, Glycine max
  Clone ID: 700870960H1
ccgtatggaaagggcagctgagaaaggaaaagcaattgcagcagctgttgaaggagttgaaaaacactggggaacatcagactccaatacatcattcattgagactctgcgggagcaaatattcaagccatcattgtccacaatcattcccgagcattcaaaacttgtaacagtatcaccaacagattcagttctgacaacaacaaagaagaggttgaatttcgtgcaagttgtgca

SEQ ID NO: 20923 - DNA, 237 bp, Glycine max
  Clone ID: 700870961H1
gaaacagtctctgcacactacactgaatagaattcacagagagagataaagagaaagcagaagcataaagaagaataagagaagagagaaatggcgcatgctcggcaacagaacgaggctggcttcacgctctccagcaagatcagcaacaatggtagtaagagcatatacgacgacgtttacggaggtccacccaagttcggcgtttcgagctctcccctcgtttcgaagactacg

SEQ ID NO: 20924 - DNA, 243 bp, Glycine max
  Clone ID: 700870963H1
gctggattgacctctgtatcatgtgtatcagaattgatgccctcatgctcgacacatccttctgcactaaacaatccggttgactctgtaccatgtgtatcagaattgattccctcttgctcggcacacccttcagcaccaaacagtcaagttggctctttatcatgtgtatcagaattgatgccctctttctcgccgccttcaacaccaaaaaatcagtttactctgtatcatgtgtatcag

SEQ ID NO: 20925 - DNA, 240 bp, Glycine max
  Clone ID: 700870925H1
ttcgtgaatctaatcaaagtttctcattaacttctgcgttagattcacgcacaaacttgtcatttcccttttcttaaccttttttgtttccttttccgtcaaaactttgtttgttacattcgacttcgaattcagattcagatttctctgtttagtgctcctcaaaccgatgacgccgcggcttgttagcttctggctccgctacggtatggcatttccatattgcacccattttgttct

SEQ ID NO: 20926 - DNA, 258 bp, Glycine max
  Clone ID: 700870879H1
cgccaaatggcgtactgttgtgagcatccccaacggtccctctgctctggcagtgaaggaagctgcctggggtctagctcgctatgctgcaatttcacaggagaacgggttggtcccaattgtggagccagagatcttgcttgatggtgagcatgggattgacaggacattcgaagtagcccaaaaggtgtggtcagaggtattcttctacctggctgagaacaatgtcctgttggaaggtattctcctcaagcctag

SEQ ID NO: 20927 - DNA, 261 bp, Glycine max
  Clone ID: 700870880H1
cagatcctgatcatataccactttgcttggatctgtaacactgcaacgtcactcatcaaaccttactcatattaattttcgccatcctcttctctttgttacaagaatttcatcaagaatgcgaaatatcaactcggtgaaggaagaatttctgaagaaatggatatggggtctgagaaaatatagctctcagaagaagaacatgagtctgatggagagaaagaaagccataaagctgtcagcagatttagctatggcttc

SEQ ID NO: 20928 - DNA, 250 bp, Glycine max
  Clone ID: 700870881H1
cggctcgagcttgattgttctattcaacaatatgtacgctaaattcgtcatcatggtgataatgcttctgtttcttttgaaaaaggttacataaatctagacaagtgttgactcattctgatctgtaactacaattacaaagactctctgtccttcacagacagcggttccaaacccaacaccattcacctgcttccattccatttcctctttctttctcccacatctctcatttcttcagatccaccac

SEQ ID NO: 20929 - DNA, 247 bp, Glycine max
  Clone ID: 700870882H1
cgcaatcatgttttatgccccggtgctgttcaacacgttaggattcaagaacgatgcatccctgtattctgctgtgataactggggctgtgaacgtgctctccactgttgtatcgatctactcagtggacaaagtgggacgtcgcattctgttgctggaagctggtgtgcagatgttcttgtctcaagtggtgattgcaatcatactgggaataaaggtgacggaccattctgatgacctttcaaaa

SEQ ID NO: 20930 - DNA, 238 bp, Glycine max
  Clone ID: 700870884H1
gtttggtctgttttcatatttattctgcatcatgttgtagtcattgttagtgatttctatcatctgtcatatttaattagttgttactctgtagtagatataagtagtttgtccattctttaataaatatctacaacattcatcgttgtcacgatcaattctcattgattgaaacctttcctagagtggagtactctttagtaatcaagcgtggaagattatgtaatgttttgatttt

SEQ ID NO: 20931 - DNA, 249 bp, Glycine max
  Clone ID: 700870885H1
ctgatagtttctcacattctcaactgcggatatggggaagaaactcaagcatgcggttcagtatgatagctacggtggaggacctgctggcttaaagcatgttgaagttcccatacctactcccagcaaagatgaggttttgattaaggttgaagcagctagtataaatccatttgattggaaagtacagaaacgcatgttgtggccagttttgcctcgcaagttcccacatatacctggcactgatat

SEQ ID NO: 20932 - DNA, 248 bp, Glycine max
  Clone ID: 700870887H1
ggaatccatggtgaaacaagcagtgactaacaagtttacagagaccatcacaactggacaagcaactctgcgtctctttttccatgattgctttgttgagggctgtgatgcctccgtgataatctcctcgccaaatggggacacagagaaggatgccgaggaaaatatttcactgccaggagatgggtttgacactgtgatcaaggcaaagcaagcagtggaagcttcgtgccctggagtggtttcct

SEQ ID NO: 20933 - DNA, 250 bp, Glycine max
  Clone ID: 700870888H1
aaagattttgctcaaaaatgtgtcgacgccaccaaaattgcaggattcgcccttgccacctcagctctcgttgtttctggagcgagtgcagaaggtgttccaaagaggctaaccttcgacgaaatccagagcaagacatacttggaagtgaagggaactggaactgctaatcagtgcccaaccattgaaggtggagtggactcatttgccttcaaggcagggaaatacaaggcccagaagttgtgcctgg

SEQ ID NO: 20934 - DNA, 249 bp, Glycine max
  Clone ID: 700870889H1
ctcgagccgaatcggctcgagtggaatttaagcagaatagattcatttctgctgaaaagcagatggtgacagccaatccagacataaatactgttgaactttgtgatgaagatgaatttatagtgctggcttgtgatggcatatgggattgcttgtcaagccaacaattggtagattttgtacgtcaacaactgctcttggaaactaaactttctgccgtttgcgaaagagtactagatcaatgtttgg

SEQ ID NO: 20935 - DNA, 252 bp, Glycine max
  Clone ID: 700870891H1
cttgtgatcatcacttgcaaaatttaaaataggttaaatatattctttaataaacataaaacaataaattagtctctaaaattggcataattatttattttgattcctttgtaacaaaaaagagtaaatttagtttttaattttgacaaccatccattagccaatttggtcttaaatgcactttaatgttaaaggaaaaatttacttatacatagcaacgtcaacaaccaaattgattaatatttgtttaaa

SEQ ID NO: 20936 - DNA, 248 bp, Glycine max
  Clone ID: 700870893H1
cattccgcataggttccgtgttccaaacaatgagtttgagtatgagcttgtgcggtaattacagtcttcagcttcaaaatcgcagaatcgtaagctgcaatcttcaccaggatggcaggcatattgttcccatcaatacgcaccaaaaaccttccaaacctgaaaagtgtcttcggtccaaatggaagattaatggcaataacattgggacatgcattggagtcatgacagtggcacacttggttgct

SEQ ID NO: 20937 - DNA, 260 bp, Glycine max
  Clone ID: 700870894H1
cacatcacaccttatcacgatatcgatcaccttcatcacaaatggagatacagtccttcctcttcctctcccttctcttcttcctctatctctacatccagttcctcgctagaaaaaaaccccgcaacaacaaagccttcaaagactaccctctcatcggaaccctaccggagttcctcaaaaaccgccaccgtttcctcgagtggaccacccaagtcctccgcgactcccccaccaacaccggcgtcttctctcgcccc

SEQ ID NO: 20938 - DNA, 168 bp, Glycine max
  Clone ID: 700870895H1
gaccgcgccaccctcatcagggcgcgaccgacagagagagcgagaaggaatccgacgatgacgatgccacaccgaccggcaccgcccgtctttctcggacaaagaaaacgaatacaaacggcgacaagcaaaggaagtatggcccgccaagttccaggtactcgttcg

SEQ ID NO: 20939 - DNA, 253 bp, Glycine max
  Clone ID: 700870901H1
gtgaaaacagataataataaaaagtgagatttcataaggatgcttaaatagaagaaagaatttcctaaggggccgtttggtttgagatttcactttgttccctgttttctgatgtatatacaagaaaaagtaaaaatagaaaacaataaaaagtcatcttttactgtactaacttttgaaatcagtaaataaagtgaaaacagaaaatattttctcaaggcaaacaatactttttcaaactggttactaatgt

SEQ ID NO: 20940 - DNA, 239 bp, Glycine max
  Clone ID: 700870908H1
cgagcccccgtcctacctcactggcgagttcccaggtgactacggctgggacactgctgggctttcggccgacccagaaaccttcgccagaaaccgtgagctcgaagtgatccactccaggtgggccatgctcggggccttgggctgcgtcttccccgaactgttgtcccgcaacggggtcaagtttggagaagctgtgtggttcaaggccggtcccagatcttcagcgagggtgggct

SEQ ID NO: 20941 - DNA, 242 bp, Glycine max
  Clone ID: 700870909H1
caacaataataataataaccaattaggccttgcaattggagtggctttttgccatgttttgtgtgatgggttagcagccataaggttcattaatgcatgggcaaagcttactagaggggaagtgttggactcaattgaaatgtttccgtttcttgatagaacaatcatgaattccacatacccaccaaggactccacgttttgatcaccctgagttgaagcctctgcctctcaaactaggca

SEQ ID NO: 20942 - DNA, 240 bp, Glycine max
  Clone ID: 700870910H1
gaaacctcggaagaacgtgctaaaatgtttaacccttctctgttcatttccatctatgcaattattactgctgtttcaattattttggtagtgataagatcctacatctttacactcttgggtctaaagacagcacaaattttcttcatacaaattcttcgttgcatcttgcgtgcgcccatgtccttctttgacactacgccatctgggagaatctaagtagggcatccactgatcaga

SEQ ID NO: 20943 - DNA, 242 bp, Glycine max
  Clone ID: 700870912H1
ttcacattttagaagaataccccctcttttgctgcatcagaggagttgtaaattaagagcatggctgcacaagctcttgtatcatcatcttctcttaccttctcagcggaggctgcaagacaaagtcttggaccaagatcactccaatctccatttggcttctccagaaaagcctcctttcttgttaaggcagctgctaccccccctgtcaagcaagatcagacagacctttgtggtttgca

SEQ ID NO: 20944 - DNA, 243 bp, Glycine max
  Clone ID: 700870913H1
ctgaaactgcacgcatcacaggatctgctcccctcacagctgttcagttgctttgggtcaacttgattatggacactctgggtgcattggctttggccactgaacctcccaatgatggacttatgctaagacccccagttggaaggacaacaaattttatcaccaaacccatgtggaggaatatttttggtcaaagtttatatcaactaattgtcctgcggtcctcacttttgatgggaagag

SEQ ID NO: 20945 - DNA, 243 bp, Glycine max
  Clone ID: 700870914H1
gtttgggagaaatttgaccttgagattgctgctacacgaatgcctgagcaatatcaaaataaaatggtttggatcctgtgcaatgactgtggtaaaacttctcacgttcagttccattttgtggctcaaaagtgtccgaactgcaaatcctacaacacacgacaaacatgaggcggagaggtggccacgattattcattggcttcatcaaaagccttcactcgagagctctcttgatgttgtc

SEQ ID NO: 20946 - DNA, 246 bp, Glycine max
  Clone ID: 700870915H1
gcttactggggcatttgctcttggaataaagaaacttggaactgtggaaattcaggaccttcccttctttgacactgtgaaggttaagacttccaatgcacacgcaattgctgatgctgctctcaaaagtggaataaatttgcgagttgttgatggaaacactatcactgttgcttttgatgaaacaaccacattagaggatgttgataatcttgtcaaagttttgctggtggaaagcccgtctcc

SEQ ID NO: 20947 - DNA, 259 bp, Glycine max
  Clone ID: 700870916H1
tcggctcgagcgaagaagaagatggctttaggtgttcctgctcttccgttgacatacgtggctcacgttctggcagttgttgccagcgtcttggtcgtggtctgggtcgtcaatttcaggggtggcttggcttgggattctgataacaagtccctcatcttcaacattcatccagttcttattgttattggcttactagttcatgggggtgaagctattataagttacaaagttttcccctaaagaaggaagtgaagaa

SEQ ID NO: 20948 - DNA, 241 bp, Glycine max
  Clone ID: 700870920H1
ctccatctcgtgtggctgttctaataaaatctctgaatgtatccagaatcaaactctatgatgctgatccaaatgttctatctgcattctccaattcagatgtggaattcatcataggactagggaacgagtatctgcagagcatgagagacccttctaaggctcagagctgggttcaaaagcatgttcagccttacatttcacaaaccagaatcacttgcatcactgtaggaaatgaggt

SEQ ID NO: 20949 - DNA, 237 bp, Glycine max
  Clone ID: 700870922H1
gcagaaagcaagctcatcctagagtttgaaaaatggcagcagcctcctccatggctctctcttccccatccttggctggcaaggccgtgaagctgggcccatcagcccccgaagtcgggagggtcagcatgaggaagaccgtcaccaagcaggcctcctccggaagcccatggtacggcccagaccgcgtcaagtacttgggcccattctctggcgacccccgtgctacctcactgg

SEQ ID NO: 20950 - DNA, 241 bp, Glycine max
  Clone ID: 700870924H1
caaacacaaattttatgtgattagtcgcggtatttaaaataaaaaatgaaagtagacaaataaaaaaggaaaggagatgtttgaataaaaataattccccttcaagttcttattttttgagaggacaggacaatatgaatgttttattatgctctatcaacacattaaaaagattatatgatatatctgctgtggaagtaggtcaacatttctcatggcaaatagggagtttccaagtaca

SEQ ID NO: 20951 - DNA, 259 bp, Glycine max
  Clone ID: 700870878H1
agaaaactttgcaatttcgtaggagatgctcaggagcagcacgctaacacagagtgttacagtcacctgtgttcatcacagtcacagacaatggttccaatcaattcccgtaaattatagattctgtgacgctgctcggaactctctatcatccaactccgccatcttcaagtggcaaagaacggctaattataatcgtaaccgttctggaatgggaaccttcaccacgcgcgcgttggcgcacggctccagaacgccg

SEQ ID NO: 20952 - DNA, 260 bp, Glycine max
  Clone ID: 700870843H1
gcatttgtaggattcactcactgccattcgaggtggccgtattcctcctcccggaagcatgccatcttttgaagaaattaaggatatcttaggtttcaatgcttactatgaagaagagaagcgttatgctacaaccaccaatccgcagctttccaagagagagagcagtaacctatacagtatacaacggcgagatcaagttgatacagagcagacaaatcaaagtttcaaagatccaattgtggaagttataacacctg

SEQ ID NO: 20953 - DNA, 260 bp, Glycine max
  Clone ID: 700870844H1
aagacaagtccagtaagggcaaaaagcgcaaacatgttgtaaaacagggttcatcaagatctgcaacaacttcaagacgttctgcaaagagtcagaagaaaaatgaagattcttcagtagtacggagaaagagtacaagtgacacagaagatgagtcagaggaagacgagaaagatgaagaaaatgaggaggaaaatgaaaatggtgttcctgacaaatctgaggatgaaacaccagagaaatctgaaagtgaagacaaa

SEQ ID NO: 20954 - DNA, 262 bp, Glycine max
  Clone ID: 700870845H1
ccgctggctcaaccccgacagcgcgcaccaccgcgtcttcctccgcgacggaagcctccacatcgtgccgcgtcaccgcctccgcaacccctccctcattgactccctcaacttcatcgttaattcccctcacgaatccctcgcctccgacggaatccagcgcgccgtcagaaaacgcataagtaattaccccggcgaagctaggaagaacatgcatagggttagggttagggttccggtgtccgtggcgcaggttctgaag

SEQ ID NO: 20955 - DNA, 265 bp, Glycine max
  unsure at all n locations
  Clone ID: 700870847H1
cgcacccatttattaccaacacttcaccatcatattcctctgcgtcactctcttctaaacaagtaaattctgtcttcctttttcttctttctttccacacaacatacgagagaaagatctgctaccacagtattgtaggtaganaacagaaaccaccttgtttcggaattctgttgcaaaattaagaaggaagaaacatactcaagtggagtggggtggtgttagatggggtcgtccagagtcatcttcatccatgaaactcttc

SEQ ID NO: 20956 - DNA, 266 bp, Glycine max
  Clone ID: 700870848H1
ctgaaacttaaaggaattgacggaagggtccatggatcgtgaaaaaggctgtggggaattacagcgcttgcttattgggaaaggcgctgacgtgcaactatcacagaggaccaaactacttcgagattgacgtggacattgggagcagcgccatcgccaacgctatcctgcgcctcgcgctggggtatgttaccagcgtcaccatcgatatggggtttgttgtggaggcgcagagcgaggaggagctgccggagaggctcatcgga

SEQ ID NO: 20957 - DNA, 253 bp, Glycine max
  Clone ID: 700870850H1
ctttcttttaccctgaaaaccagtgcagcaacacaactggtggagtgcagaaagatattgcagcttcagggtttgttccatgtaactcagactccaaggattgcctggatatagagttcaatgaagatgacatcatggttgagcagttatctcttgaggaatttacactgcagggttttgagatgttaattgcacagttcactgagaagactcgtatttgtttccgagatgccctttaccgtcttgctagaaa

SEQ ID NO: 20958 - DNA, 252 bp, Glycine max
  Clone ID: 700870851H1
ttgtagaagtgatctgcaatttgcccacagttgacggtgaagatacagggaaacttgagtcaaggaaggtagttgctgctaggatgctaggaaagagcttacaagctggggatgctgttttcgagagggtgtataatgctgtctattgggctttgcgcggtgttgtgcttggtggaagtgggatccatgggaggaaattagcagaaatggctctcatgaaagttggggctggtattctgactgataaggtag

SEQ ID NO: 20959 - DNA, 249 bp, Glycine max
  Clone ID: 700870852H1
tgtgtacttatctggactcgaatgtggcggaccttgagcgaggtgcttaccctgtgttggatgaattggctcggaatgttagcaccaagaatcttgaacatgtgaggagtttgaagagtaatcttacgcggttgctggcaagagtgcagaaggtgcgagatgaaattgaacatctgttagatgacaacgaagatatggcacaactatatttgacgaggaagtggttacagaatcaacaatttgaggagg

SEQ ID NO: 20960 - DNA, 253 bp, Glycine max
  Clone ID: 700870854H1
gaaaaacaaaagagtagtggcctttaggtggtgaagaacaagagctcaaatcaaatcgaatcgaaaaaagaaagagagatcatattcatggcgatggcaagcctggctcgacggaagggttacgccgtcgttttgtcgtcgaggtcgtcgttttgtctgacaagctggaggggattcgcgtccggatctgacgaaaacgacgtcgtcgtcatcggcggcggtcccggcggctacgtggccgccatcaaagccg

SEQ ID NO: 20961 - DNA, 125 bp, Glycine max
  Clone ID: 700870856H1
cacaagtgctaatccaatcccagcttgtgcagaaaaaccatgaacacgccgtggcgtcgggattgaatgcgcgcgtgcgcacgtgtcaaacgcgacgacagttttcttctccaattcaatactac

SEQ ID NO: 20962 - DNA, 255 bp, Glycine max
  Clone ID: 700870858H1
caaccatgcttctcagaacagcttcatctttctctctcctcaaagccaacgccgaccatatactccctctccccaactcttcttcttctggtattattcgctactctcagtctctggggaaaaacttggttccatgcgctaccaaggacaccaacaaccgccccttaaccggcgtcgtttttgaaccctttgaagaggtcaagaaggagctcgaccttgttcccaccgtcccacaagcttccctcgctcgccaga

SEQ ID NO: 20963 - DNA, 258 bp, Glycine max
  Clone ID: 700870859H1
agaaaattaaattcaacatctctcttattctctcattctctctctacttctcaaagacgcacgcagcgttctaaaaccctaatcgggtatgtgcaaagagagctttgtagcacgtgcttaaggtatgttttaaacattgcttgtttagttggttccttttgatgtcatggtggcattgtgatgcaaaatgtgtgtgagctcatactgagaaggagctcatctgctaagtccatttgaagaggatgtatggaagggcat

SEQ ID NO: 20964 - DNA, 258 bp, Glycine max
  Clone ID: 700870860H1
gtttaggaaggtaacatggcattggaatcccaaccgcagaagaacaagtatggacacggggtgtttggagacgtctccagcatcatcaaagagatggagattgatcatcccaactctacctttgattttcaatttcaatttcccccaattgctgttagtttgccacagctttcttcaatgcttccttctgttcaaatattatattatttataccctctttgtatgttcccagtttcagaattttctgggctctagaga

SEQ ID NO: 20965 - DNA, 256 bp, Glycine max
  Clone ID: 700870861H1
attaccaactagataaagtctggtagcgggactaatctcccatgacatagtgaatcgatgttggaattcctgcgtgaccatgcctaaagtgagtttaaattatgcaatagtagtatttaataatgggagcgtaaattgtagatatgatttaattttgaagtcgcggggtccataggagggttagattagaaggcatgtgcgtgcctgcgatcccaataatgcataggaattgaagcataggcacccttcccttccg

SEQ ID NO: 20966 - DNA, 260 bp, Glycine max
  Clone ID: 700870862H1
gcttcctttctgaagttgctggcagcagtatccagattcacaaaaaagatgagtggatctggaaagcagagcctactggacaatattcggtaacaagcgcctataatatgctcaatggagtggatgttgaggaggataatgggtggatgattgaggagttatggaagattcgagtcccaactaaaatcactatttttgcatggaggttattaaaggagagactacaaacgaaggcaaatttgaggaggagaagggtggca

SEQ ID NO: 20967 - DNA, 110 bp, Glycine max
  Clone ID: 700870863H1
gtcacttatttatgtgccttgcgactctctacaatttacaaatgtattgagctgtcatgtatgcagaaaataaattactttatttataagtggtatattctatttgggac

SEQ ID NO: 20968 - DNA, 249 bp, Glycine max
  Clone ID: 700870866H1
ggaggaacgcagaccgaggcgtttccagttcgaaagggaaatgtaagtgtcgttgttggtgaagggtaggtgagagaaacgaaaggggtgtgtgttgggttgaataggtatagataggatcaatgagcaacaacaacgcaggaaaggtggtgtgtgtgacgggtgcttctggtttcatagcttcatggatcgtcaaattccttctccaacgtggttacactgtcagggccaccgttcgctacccaagta

SEQ ID NO: 20969 - DNA, 250 bp, Glycine max
  Clone ID: 700870869H1
cttatttgcagagcattggagccattaatcctaccttcagaaactagccaggttgttaaggaacgacttttgaattttgtaagatcattatcaacagtactggccttcgcctattgtttgtcaagtgtaattcagcaagcgcagaaattcttagcagagagtactgatgcaagtgagacgagaaaattggaatcccatatttctcgtctcacttgcatcagtactctctgcggtatggatagctgccttt

SEQ ID NO: 20970 - DNA, 253 bp, Glycine max
  Clone ID: 700870870H1
atcttgtttgtgtccattcgccttgagattgatttgaatgtttgatttataaagcaatgggactttcatatatcaaaatgcttcgcgacttcagtcaatttatttctaaaatcatgtgaattgaagtaacattttcctgttgtagcttaagatgaatatatcccatgcggatagtatttattactctacctggttctaacacttatccaataaaaacctgatcttcatcttctaatatgttgtcaaatgagaa

SEQ ID NO: 20971 - DNA, 251 bp, Glycine max
  Clone ID: 700870872H1
gtttcttttcttttcacttcgctgtgaggttgacgcaaagactgaggtcaagccactaacacacactacacttggcgcgcatttttttccatgggaaaccgcttatccgaagtcgccgcaggcgcgccgccatcgggctaccgccgcgattttctcaatctggccgccgctccaatcgacgctgtcgagaacttcctcaggtcccgcggccaccacggcctcttctctcagatcgagttatcgttttccgc

SEQ ID NO: 20972 - DNA, 252 bp, Glycine max
  Clone ID: 700870873H1
ctgattcatctactgttactgttgcgtgggaagctttgtcaagggtcattatttcagtacccaaggaggtgctgccttcttatataaaacttgtccgtgatgccgtgtcaacatcccgagataaggaacggaggaagaagaagggaggaccaattctcatacctggattttgtcttccaaaagcacttcagcctatattgccaatttttctccaaggtctcataagtgggtctgctgaattgagggagcagg

SEQ ID NO: 20973 - DNA, 253 bp, Glycine max
  Clone ID: 700870874H1
ccgccatattccacaagaactctccaaggatcctccttcccacgagattctttggtgggaaaaatccaagaggtttgaaatttgaaggcagggaagatggattatttcaatgcaccaggaagaaaccatctctttgttccagggccggttaacattccggaccagatcatccgggccatgaacagaaacaatgaggactaccgttctccagcaattccagctatgacaaaaactttgcttgaggatgtcaaga

SEQ ID NO: 20974 - DNA, 202 bp, Glycine max
  Clone ID: 700870875H1
ctttggacacggcgttcgtaacggtcacctgaaagtggcgcgtgcattgcgtgaccgcaagtagtacgtgtgactgccatgttgccatacctataggtgaagagggttcacttctaggtctagaggttgatggttctggaagatcttatcatactggattgatctctctgaaggataaaaggggttggagtaaagtggcaaa

SEQ ID NO: 20975 - DNA, 256 bp, Glycine max
  Clone ID: 700870876H1
ggactgtgaagatgttggagaaagttgaagaatttaacacggagaggatgatggaggaatttgagagggtgacaaaggatgctgagaggattcaaagggaaaccctgaagaggattttggaagataatgcttctgctgagtacttgctgaatttgggcttgaatgggaggacggatcctgagagtttcaaggcctttgttccacttgttactcatacggatttggagccttatatcaatagaataattgatggtga

SEQ ID NO: 20976 - DNA, 189 bp, Glycine max
  unsure at all n locations
  Clone ID: 700870877H1
ctttgttgcattccacacaacatatgatacgaaaaanatanaanaganaananactcttccttccatcctacaagggggggcataggtcaanactccagctcaatgaagatctcccctctggatctcatgtccgccatcttcaagggcaagctcgacccctccaacgtctcctcctccacacaacatag

SEQ ID NO: 20977 - DNA, 256 bp, Glycine max
  Clone ID: 700870840H1
ccacatccatctttgcgttctgcatgttggttctctgtaaacagatactgcaaaagaagaataatattgaatatttggttgggctgaatccctgggttgaagcgttgcagacatcacggctacgctaagagtgtctcgctctctcattcatgtcccaactgtacgacggaggacaggttgcgtaactgccaccaacccttcgccgcacggtgggcgtggtgctttgccttctgaaggtggtagcccttcagacttg

SEQ ID NO: 20978 - DNA, 247 bp, Glycine max
  Clone ID: 700870794H1
acgacgtcgtcgtagttggcgctggcgtcattggcttaaccatcgctcgccacttcctcgtttcttccgacctttctgtcgccgtagtcgataaggctgtcccttgttccggtgccactggcgcagggcagggacatctgtggatggtaaacaaaacccctgggagtgctacgtgggatcttgcgtcaaggagtcatcaactttggaagacgctggtacagagcatagaagagcaaggtttggatct

SEQ ID NO: 20979 - DNA, 241 bp, Glycine max
  Clone ID: 700870795H1
ggtgaattgaagcttaaaattgaagtagttaaggtggaggaccaagaaggatcaaggggttcaactaatggttggatagaacttgttgtgattgaagcgagggatcttattgctgctgatcttcgagggacaagtgatccttatgtgagggtaaactacggaaactcgaagaaaaggacaaaggttatacacaaaacactcaaccctcgttggaaccagacattagagttccttgacgatg

SEQ ID NO: 20980 - DNA, 241 bp, Glycine max
  Clone ID: 700870796H1
ggtggacctaaaatcatggcaactaatggagtcgttcatcttacagtttccgatgatcttgaaggtgtttcttctattttgaagtggcttagctacattccttctcatgttggcggtgcacttcccattgtaaagccacttgatcctccagaaagaccagtggagtatttcccagaaaactcgtgtgatcctcgtgctgccatttctggaaccttggatggtaatggaagatggctgggag

SEQ ID NO: 20981 - DNA, 74 bp, Glycine max
  Clone ID: 700870802H1
gtttcctcttctcttaaccgctccatgtcgaagaggaagttcggattcgaaggtttcggcataaaccgccaatc

SEQ ID NO: 20982 - DNA, 259 bp, Glycine max
  Clone ID: 700870803H1
ctggcaccggcaccgtttgtgtcttctcctgggtcggtgtcgccgcctctggagtctccgccgatgtcgccgatgactgtgagtgttaatgagatggtggcgtctttaaggaacttgcaactggggaaggtgaagtctttgccttcttcttggaatgtcatggggccttccgggttcggatctccgagaggacccatgatccgacccggattcttcagccttccgaccaccccgacccaggcaccgactcgcggtgggg

SEQ ID NO: 20983 - DNA, 263 bp, Glycine max
  Clone ID: 700870804H1
atcgaaccctttttaaacgctcaaatacaaatttctggcaccaaatccttcccactctcctcaattccattcatttcaactcaacaatctctcagatccgtcaaacaaaatataaaagatagaaaaccctagttctgtaaatatataaaggaaaaaagctttttgctggttttgaggcatagcattaaattggattttgattattcatggctgaacaagcattggaaggtagccaacctgtggatttaacaaagcacccttct

SEQ ID NO: 20984 - DNA, 258 bp, Glycine max
  Clone ID: 700870806H1
tgctgtcctttatgcttccgtttaagattaactccgaaattgtacagagagagcgttttcgtgttgtgtgtgttttcttctgtcacaacgtaatactattattattgttgtttgggacacaacaactcagagagttcttgcaaatttgcaatctctctctctctctctctctctatcccctttctgccgacgattttgtgtgtcccctttggagcagttcgtgcccttgttgttggtttgtagtctttcgctgaaatc

SEQ ID NO: 20985 - DNA, 263 bp, Glycine max
  Clone ID: 700870809H1
taaaccactatcataacaacggaaatatttttctctgatgttcttcaaagtaaagactatgttttggggctgttgtgggacagatgctaaaactgatattcgtgatgttgataatgttattaacgtagacttatatcataaagccagagttgatactcatctcaaaacagaacatgataccgaaatgcaaaacaattatctgactacttcagagggtcatgatgaaactaacactaaacctcctaaacttcgattagtagtct

SEQ ID NO: 20986 - DNA, 263 bp, Glycine max
  Clone ID: 700870811H1
cagagatgtttgtagcagtggaagggtagtttccatcagagctcaagtcaccactgaggctccagccaaggttgaaaaagagtccaagaaacaggatgaaggtgtggttgtgaacaagttcaaacccaagaccccttacgttggtagatgcctgctcaacacaaagatcactggggatgatgctccaggagaaacttggcacatggtcttcagcaccgagggagagattccttacagagaaggacaatcaattggggtaattc

SEQ ID NO: 20987 - DNA, 258 bp, Glycine max
  Clone ID: 700870812H1
aagacaagtccagtaatggcaaaaagcgcaaacatgttgtgaaacagggttcatcaagatctgcaacaacttcaagacgttctgcaaagagtcagaagaaaaatgaagattcttcagtagtacggagaaagagtacaggtgacacagaagatgagtcagaggaagacgagaaagatgaagagaatgaggaggaaaatgaaaatggtgttcctgacgaatctgaggatggaacaccagagaaatctgaaagtgaagaca

SEQ ID NO: 20988 - DNA, 267 bp, Glycine max
  Clone ID: 700870813H1
caaacccttcctcacagcactcatcggttcttttggtgccttatttgtctattcggttgaagttgaataatagaacattccatggctgaagaaatgaaaatggtagaacctggaagaggtaagaggaagtttttcaaaacgcaaggccataaaaagtcaagtaagaaagcaaaagtgatgccaccacaacatggacaaaagaaagttaaaatagacaaaaaaatgaagaaacttttccgcaagcgagcacgggagtataattctgat

SEQ ID NO: 20989 - DNA, 270 bp, Glycine max
  Clone ID: 700870815H1
gccacccaaagcgctcgttcaaacctatcagtataactggccatcgcagactgtcaacgagagagacttcgaccaagcgcttgctcaagaggagctggaatccggtttcgataatagcgcactggagcctactgatcccgacaatcttgataattggtctgcagatcccgaagctgcctctgccaacgacacaactatggctgttgatatcggcgatgcatgggatcttgatgaaccagacctcgttgcagccgatactcaagaagagca

SEQ ID NO: 20990 - DNA, 283 bp, Glycine max
  Clone ID: 700870816H1
ggaattcggctctagaatgcacatcgcagtctcatctcttctgctctctcattacgctctttcctccgatctcaggtgttgtttaagcttcctgtgttggcttggtatccttgcaagttcttctgtagcagattccaaggtgaaggtgtcacgttaaagtttctttcatgtttgaacaggctactatccatttgggagcaactgagctgcttggattgtatttttcttcttctagaaaaaattacagaccctcaccacccagacttagttgtatgaacggttg

SEQ ID NO: 20991 - DNA, 259 bp, Glycine max
  Clone ID: 700870818H1
cacatcacaccttatcacgatatcgatcaccttcatcacaaatggagctacaatccttcctcttcctctcccttctcttcttcctctatctctacatccagttcctcgctagaaaaaaaccccgcaacaacaaagccttcaaagactaccctctcatcggaaccctaccggagttcctcaaaaaccgccaccgtttcctcgagtggaccacccaagtcctccgcgactcccccaccaacaccggcgtcttctctcgccc

SEQ ID NO: 20992 - DNA, 146 bp, Glycine max
  Clone ID: 700870819H1
tgccaatacccatgtgcaacgaaattcaagcccaagcccaagcccaagcccaagcccaacctgggtttaagctcgtcggtttcaaaaacttcgtccgaaccaatcctaagtcggaccgctttcaagtcaaccgcttccacacaaca

SEQ ID NO: 20993 - DNA, 258 bp, Glycine max
  Clone ID: 700870820H1
cacgagtgagattggaggaacaccactgaacttaagcgcgtgttcttccattcaggcaagtccacaatcctcgtcatacccgagtcctgtaccatcctaccatgctagcccaacctcttcctcgttcccaagccccacgcgcattgacggaaaccacccttcttcctttctcatcccattcatccgcaacataacttccatccccgccaacctccctcctctcaggatatccaacagcgcccccgtcaccccacctct

SEQ ID NO: 20994 - DNA, 257 bp, Glycine max
  Clone ID: 700870821H1
ctctctctcaccaaagccttcctagaacgaaaaaaaaaagaagagcaattttccctcgccaaagaagaagaagcaaacaatggccgatcaacttaccgatgaacagatctccgagttcaaggaagccttcagcttgttcgacaaggacggcgatggttgcatcacaaccaaggagcttggaactgttatgcgttcattggggcaaaacccaactgaggcagagctccaggacatgatcaatgaagtggatgctgatg

SEQ ID NO: 20995 - DNA, 259 bp, Glycine max
  Clone ID: 700870822H1
atcttcattccttccctattactctttctctgctaaattatttaaattttctctctttctctaattaattccctttgttatcaaaatggctgtggctatggctgcttgcagtcttggacttcacttgagtgctgacaacaccttgagaccttttgaaaaaaccactatcttgaaggccctctctatctctgatgctactaaaccatgttacatttctcacaaaacaagattatcatcttcatcttcaggaataacaatg

SEQ ID NO: 20996 - DNA, 259 bp, Glycine max
  Clone ID: 700870824H1
ataagattcttccctctctctctccagaatttcctcctcccactgcttctttcttccttgcagcgcgattgctgcatcctcctccaataagagctcgctgctagcgaaccctaacacggcggcaacgtgaggtgttcggttgaagttcagatcagccatggccgcagcaacccccacttctctgcggttcctcctctccgtttccgtaaccctaaccctaaccctgcttaacctcgccgcctcaaattccgaaggcgac

SEQ ID NO: 20997 - DNA, 262 bp, Glycine max
  Clone ID: 700870831H1
tagcggtataggatttacgccatgccatttccaaggttggtgatttcgctgatgacaacaggtcaggtattgataggtctttgcatcggataagcgcgattcggaatcggaaaatgcaaatcattgggcttacttgtcgggtgggtcgagctgtgggtggcagtgctgaaattatacgtgatttggttgaggatggaggttctatcttggtcattggacctcctggagttggcaaaacaaccttaatcagagagattgctag

SEQ ID NO: 20998 - DNA, 131 bp, Glycine max
  Clone ID: 700870832H1
ggcatttttatttttttagaatcttgtaatttcgtttacatgtacatccctaccttcctcctattgcttttgcacattccaatgtgaattcacttgtgtaaacatttgatttttatgaaatctttgacaag

SEQ ID NO: 20999 - DNA, 246 bp, Glycine max
  Clone ID: 700870833H1
tagaaaaataaacgtatggtatgaaatcatacgacgtatatgtaataattatgtgttgccattttgagtatatatatatatatatgtgtgtgaaagagaaaaatgtaataaataacttgataagagagaaaaatagagataaaagaaatgaaataaaaataaatgagtgtatggttatgattatgtttgcacaccatatttcaggggggagtacacgtgattgcatagtttctttctgtcactata

SEQ ID NO: 21000 - DNA, 255 bp, Glycine max
  Clone ID: 700870834H1
gtgtggtgcaacgcagtcctttttctatttgtatgtttgtatgagactgagaaagatagagagatagtgtgtgcagaagatgtggctattcggcagaaaaggggcttctgggttttcatcatcatccactgcagagcaagtcactgaaggaattgatggaactggtttcactgccattgtcacaggggcatccagtggtattggcactgagactacgcgtgttcttgctttgcgtggtgtccatgtgattatggg

SEQ ID NO: 21001 - DNA, 69 bp, Glycine max
  Clone ID: 700870835H1
actcttcagtttttgctaagtagtcaaaaaagaaaaaagagactacgggtcaccaacgcgggcgatgct

SEQ ID NO: 21002 - DNA, 253 bp, Glycine max
  Clone ID: 700870836H1
ctgagtcttgcaattgaagttgaagtcttgcccttctctcttcaactccaaacacaagacatcatcatccatggctgcctccgtctccactgtcggagctgtcaacagagctcttttgaacctgaatgggtctggacctggggtttcagctcccagttcatccttctttgggagcagcttgaagaaggttattggctcaagggtccccaacacaaagatttcctctggaagcttcaagattgttgctgtagaa

SEQ ID NO: 21003 - DNA, 255 bp, Glycine max
  Clone ID: 700870838H1
taattattaaaaaaattaaataaatattaaaaagaaaaagctgtaagtaagggcgtcttaaagttcctcggccaaattggagtacagaatcattcccaaagatctatgtggcatatgcgaaccgtgaataccatagttttaataaaatttgaccaatagtagagagtaggcaggaaggaatgtattagaaagtgtattcttaattgtaacactcttaagaagtatatatcaaaccaccttaaattcatgtatgtt

SEQ ID NO: 21004 - DNA, 246 bp, Glycine max
  Clone ID: 700870793H1
aagaaaagaaaatcctcaattttctgagcagccaaacactctctctctgtctctcgaaaattctcagtttgcagagaaaatctgaatcatgtcgtggcaagcgtatgtcgacgatcaccttctgtgtgacatcgaaggtaaccacctcactcacgctgctatcatcggccaagacggcagcgtttgggctcagagtaccgacttccctcagttcaaacctgaggagataactgccatcatgaatga

SEQ ID NO: 21005 - DNA, 246 bp, Glycine max
  Clone ID: 700870751H1
atgggagggtcccttcaatccccctctggtttccatcttgcaggatcatctgacatgcaaattaggagtccaaagaaaccaagaagttcggaaattcaaaactctccaagtagtatactctcagtgggcatggaaatgaagcataataataatggtgatcatgcaaataatagagaagccaacaacacaaagtttggcaatgaaaggcaccaccagaaagatggataccctttgatgactagcaat

SEQ ID NO: 21006 - DNA, 246 bp, Glycine max
  Clone ID: 700870755H1
gagaattggcaacgatggtgctgcttccgatccaaaacctagccctgaagttctagatccattgtctgatgaaattgacaggaaggaaaaaagacttgaggactatccacgacctctctctgttgttggagttagcgttctaaagggtatcaggattaacgagatgttaaaggagataaggtcggctttaaggaagtgctcagattccaaagaagcattgtctttcagcgtgccaccttgagaatc

SEQ ID NO: 21007 - DNA, 248 bp, Glycine max
  Clone ID: 700870757H1
ctttgccaagatgggaatcaaccccatcatgatgagtgctggagcgttggaaagtggaaatgcaggagagccagcaaaactgatcaggcagagataccgtgaagctgcagacatgatcaagaagggaaagatgtgcgctctcttcatcaacgatcttgatgcaggagctggtcgtcttggtggaaccacacaatacactgtgaacaaccagatggtgaatgccactctcatgaacattgctgataacc

SEQ ID NO: 21008 - DNA, 248 bp, Glycine max
  Clone ID: 700870758H1
gtatagcattggcctgtgctatgaatagttcttttagggggcgtgccagttctgatatttacaccatctgctctcaagactgtgaattatggaatcctgcttgcacaaaagcaatgactatgtcatttaatccaaacccgtgttctgatgcatggagtttggaatttctgaagcgtaccggatttcattgtgatatcatttgtgtcactggatggactgccactccaatgcaggatgttcaggttaca

SEQ ID NO: 21009 - DNA, 250 bp, Glycine max
  Clone ID: 700870760H1
caaattggccttcacactgacatacccatatccacttacaccaatctcttccttgtcctcctcttctgcttctctactccaccttcttcaattcaatggccgccacatatgccttcgccctcggctatttctgttttctcccatggccacagccgatcaagacaaggttgaggaagatgctgccgttgttgatagtaaaatcctacaatattgtagcatagacaaaaaagagaagaaatcagttggtgaa

SEQ ID NO: 21010 - DNA, 253 bp, Glycine max
  Clone ID: 700870762H1
ctccatctacaatcatacatacctttattctaagttctgatggctctgcgatcattctcttacgatgtgttcctcagcttccgaggggaagatactcgttatggtttcactggctatctctacaatgtccttcgggaaaggggaattcacaccttcattgatgacgacgagccccaggaaggggacgaaatcacgacagcacttgaggcggctattgagaagtccaagattttcatcatcgtgctctctgaaa

SEQ ID NO: 21011 - DNA, 252 bp, Glycine max
  Clone ID: 700870764H1
accccctgaagtctactggaagtacgagcgtcctactacgccaatgccaaaagccatcactgatatcctttactctgattgggtggaagagagaagcagctcagtgcatgttggaggtggaggcgtgaacgtgcatacaggaaaaggaggtggcagtggcaccactgtcaacgttggtggacaaggatgcggaggcgtaaacgtgcatgcaggccacaacggaaagccagtgcatgtttcagttggctcaaa

SEQ ID NO: 21012 - DNA, 245 bp, Glycine max
  Clone ID: 700870766H1
gtttagatctactgattccttccttccattgagagtgcaatggagggaggagattggattattcccttacatggcagcttctgatgtaactaccgtttctgcaatgggaaataaaagtataaaaccacgcttgaaatccaaattgagaacaacaagttgtcacgtgttaagactttactcccttgtatattttggcttgtgcaacttcgttcaacttaagttgcattcttcagtgaaaattgccg

SEQ ID NO: 21013 - DNA, 238 bp, Glycine max
  Clone ID: 700870767H1
gacgtagtggtgatggaggtgccgaagctgggaaaacaagccgcaacgaaagcgattaaggagtggggtcaaccaaagtcaaagatcacacaccttgtgttctgcaccacttcaggcgtggacatgcccggagcagattaccagctcacgaagcttctcggcctgaggccctccgtgaagcgcctcatgatgtatcagcagggctgcttcgccggcggcaccgtactccgcctcgcga

SEQ ID NO: 21014 - DNA, 244 bp, Glycine max
  Clone ID: 700870768H1
gggttaagcggtgagatttgcgaatctgagaaatggcggattcttctcgggaggagaacgtttacatggcgaaattggcggacaggccgagcgttacgaggagatggttgagttcatggagaaggttgcaaagactgtggaggttgaggagttgacggtggaggagaggaatctcctctctgtggcttacaagaacgtgattggtgcgaggagggcttcgtggaggatcatatcctccattgag

SEQ ID NO: 21015 - DNA, 232 bp, Glycine max
  Clone ID: 700870769H1
ctcgagccgtccaacttaatacatattctgatgcagcttcaagaaattccttttaagtgtaatgttcagtagctgtttacaggggaatgctgttttttactgttatgctgctaattacaatacacgatcattgatgttactggttgcaaatgttgaataggaatatagaaacatattgctacagtttgtctatgacgattagatgaatggaaattctaggaccttgaatttg

SEQ ID NO: 21016 - DNA, 242 bp, Glycine max
  Clone ID: 700870772H1
tcaacaccaaaaatatctgttgctctctactctgcttagggttccaacttccaacccaacacttatctttctcatgcaacaagggaaaatgaggcctattttctgtggaaattttgaatatgatgcccggcagtcagagctggagcggctttttagacgatatgggaaggttcatagggtggatatgaagtctggttttgcttttatctatatggaagacgagagagatgctgaggctgcta

SEQ ID NO: 21017 - DNA, 243 bp, Glycine max
  Clone ID: 700870773H1
aattatctctgacatattccctaaaataattatttttatagtgaatcatttattaagaaaaataaataaactgaagggcttatttattagttttgatcggttatacttataccccttccttctatcagagagggtgtccatcattccccttttcaagtatgaacttaataaaatcagtcttgtcctagtagaattcagtgatttgtatcttggtaccagtggtaccccttttataatatattt

SEQ ID NO: 21018 - DNA, 243 bp, Glycine max
  Clone ID: 700870774H1
ccccgattgggtggaagagaaaagtacctcagtgaatgttggaggcaagggcgtaaacgtgcatgcaggaaaaggaggaggtggcaccaatgtcaacgttggtggaaaaggatcaggcggaggcgtgaacgtgcatgcaggtcacaagggaaagccagtgcatgtttctgttggctcaaagtctccattcaattacatctacgcttcaacggagactcaattacacgatgaccccaacgtcgc

SEQ ID NO: 21019 - DNA, 247 bp, Glycine max
  Clone ID: 700870776H1
ctaaacccaaaacactattttattatcttcttcgtctgttctttgcattgaagaaaatttctttgaattgaagaaaacttgaaatcgaattgtgaaacagaaaataaaccaaaggaaatttttactgattgaattgcagagattggaaaaatggcgttgagtatgactcaacagatcgggaccctagctggtgcgacggtgccggattcctcggccggagaatcgaccgcggcggtgagtgccgccg

SEQ ID NO: 21020 - DNA, 248 bp, Glycine max
  Clone ID: 700870777H1
aaaaaaaaatctgggacgtatcgcccaaataattggtccggtactagatgtagcttttcccccaggtaagatgcctaatatttacaacgctctgatagttaagggtcgagatactgttggtcaacaaattaatgtgacttgtgaagtacagcaattattaggaaataatcgaattagagctgtagctatgagtgcgacagaaggtctaatgagaggaatggaagtgattgacacaggagctgccctaa

SEQ ID NO: 21021 - DNA, 243 bp, Glycine max
  Clone ID: 700870780H1
ccgagagcaagctctacgccatcttggacgatcattacaggatgatgtttggtgttgagcctgaggagacttatgatgaacgcccacagcagaacaggcctgtgagctggcatccctcttcaacacagttccaggcatcgcaggcaccttcctacttcgagtctcagcaagattggtcttccgcatctccacaacagtcggtgccaggatcagatttctactctctttctacacgcaattcga

SEQ ID NO: 21022 - DNA, 256 bp, Glycine max
  Clone ID: 700870781H1
ggaattcagctcgagtatgattcggcttgacatgagtgaattcatggaaaggcacactgtctccaaacttattggttcacctcctggatatgttggttacactgaaggtggtcaattgaccgaggcagttcggcgtcgtccttacactgttgtactgtttgatgagattgagaaagcccatcctgatgtgttcaacatgatgcttcagatcctggaagatggaagactaacagacagtaagggcagaacagtggat

SEQ ID NO: 21023 - DNA, 240 bp, Glycine max
  Clone ID: 700870782H1
gccggtgaaggcccaattcgagggtgctgaaatgggtgttgcagctgagaacggtggctgcaactgtggatcaaactgcacttgcgacccatgcagctgcaagtgagatcaacatgcataaccttcaagcagagatagctgtaatacatgtatcaataaataataagtatgtgttgtgtttgaagttttagaataaagtggtcatggcccgcctttgcaaattcaaatgttctaggattt

SEQ ID NO: 21024 - DNA, 242 bp, Glycine max
  Clone ID: 700870783H1
ctcgagccgaatcggctcgaggtcgccttctgcagaatgtgtttactcgtaaagtcaagaacctgaaagcccctaagtttgatcttgggaaactgatggaggttcatggagattactcagaggatgttggtgccaaggtagacagacctgctgatgaaatagtggcagaggaacccactgaaattgttggagcttgatttcatgatgcattcagtttgttctaggttttctttttcttacgt

SEQ ID NO: 21025 - DNA, 242 bp, Glycine max
  unsure at all n locations
  Clone ID: 700870784H1
ctctttttctttgtcccaaacacacttcaactccactcatttccttttactnggtcttgagtcttgaagttccttattacataagatttatgcaaatcccttcagaaaatctccaatatccaataattgcgccaaacccaaatccatttcacttcatattccttcaacaactcgtcacctgaaccgaaccatgagagaggcgcagaacgacatcgttgcaacagaattcgcaacgacaacaa

SEQ ID NO: 21026 - DNA, 239 bp, Glycine max
  Clone ID: 700870786H1
cttgtttggaattttggcggcactgatccttcagccaaacagtggggataatgatcagtgccgccactgtttggctgaaggatcttcgtataatctctattttgtcagctggaggagtttttgcaacactgttgattgttgtctgtgtgttttgtgttggaacaataaatggtgttggattccatcacactggtcaattggtcaattggagtggcattccattagctattggtatccat

SEQ ID NO: 21027 - DNA, 241 bp, Glycine max
  Clone ID: 700870789H1
gaaaaacaaaagagtagtggcctttaggtggtgaagaacaagagctcaaatcaaatcgaatcgaaaaaagaaagatagatcatattcatggcgatggcaagcctggctcgacggaagggttacgccgtcgttttgtcgtcgaggtcgtcgttttgtctgacaagctggaggggattcgcgtccggatctgacgaaaacgacgtcgtcgtcatcggcggcggtcccggcggctacgtggccg

SEQ ID NO: 21028 - DNA, 243 bp, Glycine max
  Clone ID: 700870791H1
aagcaatttggcattttaaaggctggggcagttgggttggtatttcaagcgttacttctcagcatggctgttgctgtatattggagtggaacaatttctcatcagagccctcttcttactttcctatttctgattattctgtcacggttaggacacatgtcatatgatgttgtaggggctcagattctccagacaggaatcccatcatccaaagcaaatctcattgggacgacagagattgct

SEQ ID NO: 21029 - DNA, 243 bp, Glycine max
  unsure at all n locations
  Clone ID: 700870792H1
cctcgagccgaatcggctcgagtcgcagagtctcttgatcctggttccctcaccctagggttaccgnttggtccctcttcaattaacttcaatatctgcgagagagcgtgagagtgacgcgcctcccgagagacgccatgggaggtgacagtgccattgaggaatccgaaggggtcaacgtcaacatcaacgttcgctgctccaacggtttcaagttttccgttcagattgccgtcgattcca

SEQ ID NO: 21030 - DNA, 245 bp, Glycine max
  Clone ID: 700870750H1
gagaacttctgctgggccaaagtgaaaggcaagtcgagtatgaccgtgctggtagaattattaagggccatgaagtagctctccccaggagcaagtatgaagaagatgtttacattaacaaccacacgactgtttgggcctcatggtggaaggatcatcaatgtggctataaatgctgcaagctgacaatacgcaatagctattgcactggtgctgctggtattgatgcggcagaggctgcaagc

SEQ ID NO: 21031 - DNA, 263 bp, Glycine max
  Clone ID: 700870714H1
cggctcgagcaacacacgaccgcttcaacaactactccatcatcatccatccacaacaccacatcacacacaagcaaccacacaccactgccaacatgcagatctttgtcaagaccctgacgggcaagaccattaccctcgaggttgagtcctcggacacgatcgacaacgtgaagagcaagatccaggacaaggagggcatccctccggaccagcagcgcctcatcttcgcaggcaagcagctggaggatggtcgcactctc

SEQ ID NO: 21032 - DNA, 261 bp, Glycine max
  Clone ID: 700870715H1
aagaattattgagacattagatattgttttggcgtctaaacttttagaagccaattgatcattttcttcctaataacacccacatctcgagtttgtggtggatgaagcatgtgtctgaaatagccttggagaatcttagaattcggttaagaggcacaactgcacaagcatggttggtcatatagggtgggggcgaacacaggtaattcatcagaatgagcccatgttaaatgtgaaaaataaaataactgaatttccgag

SEQ ID NO: 21033 - DNA, 261 bp, Glycine max
  Clone ID: 700870716H1
aacaacctcaaaatccctttcttgtgttcgattagatattgccttcacaccagagtctgagtcctctgagactttccttcagtccttcaccttctttctctctaggcgcaaaacctcgtactgtttgtggcggctaaggatgtcagggaaaggggcgaaggggttgatcacaggcaaaacctccgccgccaacaacaaagacaaggacaagaagaaacccatctcgcgttcttcacgtgccggccttcagttggccgtatc

SEQ ID NO: 21034 - DNA, 257 bp, Glycine max
  Clone ID: 700870717H1
cgttatctggcggcaacaatgtgattgatacctcgggccgtaatctaaaccttggttctgcttcttctcgtgcttctgcgcctgttatgcctgctgccatcagcactaatgcagccagttctcagcaacaaatgcagcgaaatcagcagcagcaaattcttcagcatcagaagcagaatcaatttgcagctgcagcagccgccgcggcggcccgcaacaagaccccatcaatatcaaaaaatactggtagcccaagg

SEQ ID NO: 21035 - DNA, 249 bp, Glycine max
  Clone ID: 700870718H1
aagtgctcggcgaggcaccaccaccaccaacaagcaaatggctgctaccattggcgttggcgccgcaaaagccatatcaatcgcaatagcagttaggcacctccgaacaaaaccttacgcagcagcaacaacaacagcacttgctcttctttgcatccacaaacctctcttcccccctcattcctctcccttctactctagcagcgctttttgcgccgcgacgcttcgcacctccgacaacagagtgca

SEQ ID NO: 21036 - DNA, 254 bp, Glycine max
  Clone ID: 700870719H1
gaagagcatcactgaactaacaaagcaaccctatgtcgaaggtggtttgtgtcaccggagccagcggcgccatcggatcatgggtggtcctactcctcctccagcgtggttacaccgtccatgccaccgtccaagatatcaaggatgaaaatgagacgaaacatttggaggaaatggaaggagcaaagagtcatctccatttttttgaaatggatcttcttgacatcgactccattgccgctgccataaagggt

SEQ ID NO: 21037 - DNA, 254 bp, Glycine max
  Clone ID: 700870720H1
aagagtccaagaaacaggatgaaggtgtggttgtgaacaagttcaaacccaagaccccttacgttgacagatgcctgctcaacacaaagatcactggggatgatgctccaggagaaactcggcacatggtcttcagcaccgagggagagattccttacagagaaggacaatcaattggggtaattcctgatggtgttgacaagaatggcaaacctcataaactgagattgtattctattgctagcagtgccatt

SEQ ID NO: 21038 - DNA, 254 bp, Glycine max
  Clone ID: 700870721H1
caaagacaagaggaaaggaattggcaggcaggattcattttcctcagagtctccaatgcaggatataccactacttttgcctcaagaagctgatggactagatacttcaaatggagatcatacaaatttaagtgaaaattttccattgttgtcccaaaagctggagcatgaaactttagtttcagacacccagatgaaagggtttcaagatgaagttgttcctttaaacttgggggcacaacctgttgccaatg

SEQ ID NO: 21039 - DNA, 252 bp, Glycine max
  Clone ID: 700870723H1
aagcataggtgctcagagggtaaagaattgttgcatttctttccgcaacttttgtgaggaacagaacatagacgcgtgcctcagttgtctgcaacaagtaaggcaagagtactgccatgttaagaataagtttgagacactgatcaggcttgagcaacagatcgtggcagctggtgggtcaatcccaatgatggaatttagtttctaaggatgtgaatttgtagagaaggaaacaagagtattttgtgatcc

SEQ ID NO: 21040 - DNA, 254 bp, Glycine max
  Clone ID: 700870726H1
gtattctatagctaaaatttattttagaataatatatttaaatcattacattgggaacttcacatcttgcattttttttctagactgcagatgatgtcgattcatttatccattttcccacttgaaatatattgattttttattttttatatttcaattaaatggaatacttggcatttggccaaatattgagcattaattactaaaagactgcccttataaaaataaagggtcttaaggctgtgcagagttaa

SEQ ID NO: 21041 - DNA, 257 bp, Glycine max
  Clone ID: 700870727H1
ctcatgttgaagagtctaccttgaatgatctcaagaccaaaattctagctcgtgatccttcaagttctggagatattcaaaaggcggttcaaaaatctcttttgtggttgagggatgaggttcgaaaccttccttgtacatacaaatgtcggcatgatgctgctgctgacttaattcatatttatgcttataccaagtacttctttagaatacaggattatcaaactattacttcgccacctgtctatattagtcca

SEQ ID NO: 21042 - DNA, 257 bp, Glycine max
  Clone ID: 700870728H1
aagaagggcacgatcgagaaactgcaaccaagcagccatgttgctcatagccgaaatatcgaatcctcggagatcgaagacaggaagccggagattctgaaaagcggaggaggttgtcttccgccgcctgtgccggtgcctgctccgccgcaagcgacggcgaagacggattacatgtacttcgacccgtcggattcaatcccgaagctgcacacggactcgagctgttcggagcaggtggtatcgccggaattcgc

SEQ ID NO: 21043 - DNA, 257 bp, Glycine max
  Clone ID: 700870730H1
ttcacattttagaagaataccccctcttttgctgcatcagaggagttgtaaattaagagcatggctgcacaagctcttgtatcatcatcttctcttaccttctcagcggaggctgcaagacaaagtcttggaccaagatcactccaatctccatttggcttctccagaaaagcctcctttcttgttaaggcagctgctaccccccctgtcaagcaaggatcagacagacctttgtggtttgcatcaaagcaaagtct

SEQ ID NO: 21044 - DNA, 251 bp, Glycine max
  Clone ID: 700870731H1
cctgcatcaacaccaatccagatgaatgattgatcacatgtcactttagatgaaactaagactctagttgtttggaatacttcatgcctgtcctttgggctttaggagtagtgtgcagaggttttggagataagaatgaagataagattttatgcagatttcctatgtttgcatagtagagtgttaggatttctaaatcagtttgtgtgaatgcaatgcttatggtagaggattttctttttggcttctct

SEQ ID NO: 21045 - DNA, 172 bp, Glycine max
  Clone ID: 700870733H1
accagcccttaggcaaatgggaaaggcttctctgaattctctggcctccgcagctcatcaggcttccttccctttctagaaaatcttcagaggatttccattgctgtcgattgccgttccagaacctatggcagttgtcaagcagtggaggatacaagaagggtgtgacaga

SEQ ID NO: 21046 - DNA, 143 bp, Glycine max
  Clone ID: 700870734H1
tgttaaacctgctggactgtctcgtggaagaggaattgcttgctttagaaatttagttgagattcaggactatgttaagggtaaagagtcacagtgggttgtgcagaaatatatggagaatccattaattgtccacaagagga

SEQ ID NO: 21047 - DNA, 251 bp, Glycine max
  Clone ID: 700870735H1
atgatgtggaagagaagaagaagccttcagcacttgaagttgaaaccttgctgatcctcatcatgggaaccatttttgcctcctcactctctctctccactcctcaacatcaatccttcaccctcaagaattctcttggctccctctccccaacccaagtcaaattctctcttttgctccaaacccattgtttcaagtctcagaaagaaccaaacttcatctcccaaaccttcatcgggcacaagctggtt

SEQ ID NO: 21048 - DNA, 251 bp, Glycine max
  Clone ID: 700870736H1
tgagtcttgcaattgaagttgaagtcttgcccttctctcttcaactccaaacacaagacatcatcatccatggctgcctccgtctccactgtcggagctgtcaacagagctcttttgaacctgaatgggtctggacctggggtttcagctcccagttcatccttctttgggagcagcttgaagaaggttattggctcaagggtccccaacacaaagatttcctctggaagcttcaagattattgctgtaga

SEQ ID NO: 21049 - DNA, 250 bp, Glycine max
  Clone ID: 700870737H1
atattttaagacgttgttttggaaaacctgtcttagaatcctcaatgtactggagattcttttaaaaaataagtacattctaagatgggtctctgaaaaatcgtcatagaaggtctactcttctaagatgatttttaactagaaaccatcttagaaagatgttcttctataacggtttttagcaaagaattgtcgtagagaagtacctttgttctgagacagttttgtatgaaactatcatataaagtaa

SEQ ID NO: 21050 - DNA, 250 bp, Glycine max
  Clone ID: 700870738H1
ttcgttttctctctctctcactctttcgaggtaatttgcaatggctgaaccttccaaggtcattcacgttcgaaatgtggggcatgagatatctgaaaatgatttgcttcaactatttcagccttttggagtaataacaaagcttgtgatgttgcgtgccaaaaatcaggctcttcttcaaatgcaagatattccttctgcagttaatgctttacaattttatgcaaatgtccagccaagcataaggggg

SEQ ID NO: 21051 - DNA, 249 bp, Glycine max
  Clone ID: 700870739H1
gttttgctaacacaagtatacactcattctcaaaaggttttcatccaatttctttccctctcttttcattggtgtgcactttcacttgtggagctgcatcaactgcagtggaaattgtgctttgttcttgagatgtctggtgttcttctttgggtgagttgtggacccaaagagaacatcaactccttggtgagtttttcatgcaggagtagtagtggtggtgaaagaacacaaaagagattttctgga

SEQ ID NO: 21052 - DNA, 58 bp, Glycine max
  Clone ID: 700870743H1
cttgtctctgtattatttttgtcttcagtggaataataataaccattgcgttatttgg

SEQ ID NO: 21053 - DNA, 252 bp, Glycine max
  Clone ID: 700870744H1
gaggtatattaccagcatcatatcattagaagtgtaattgcactccacaacttgattaacaacaagatgcttaacaaggaacatgagcgggcagaagattcgaaatcagttacggtgccaggtgcagctgcttaagttttgaggggttgtgatgttcggagctctaaatgtcatttgagtacatggatttgagattgttacaccttttcctatttctgctagggttagagtacttacacctaacatggcata

SEQ ID NO: 21054 - DNA, 253 bp, Glycine max
  Clone ID: 700870746H1
ggcaattgtagatagagaacgtgctaaaggctcctattccttgggcccctatctgttctcaaaattgttggctgagattcccattggagcagcatttccattaatgtttggtgctgttttgtatccaatggcacgtcttcatcctactatgcaaagatttgggaaattctgtggcattgttactatggaatcttttgctgcatctgctatgggtcttactgttggtgctatggttccaaccactgaagcagca

SEQ ID NO: 21055 - DNA, 251 bp, Glycine max
  Clone ID: 700870748H1
gtgattagtcgcggtatttaaaataaaaaatgaaagtagacaaataaaaaaggaaaggagatgtttgaataaaaataattccccttcaagttcttattttttgagaggacaggacaatatgaatgttttattatgctctatcaacacattaaaaagattctatgatatatctgctgtggaagtaggtcaacatttctattggcaaatagggagtttccaagtacatgcccaagtacttattacttcttggg

SEQ ID NO: 21056 - DNA, 262 bp, Glycine max
  Clone ID: 700870713H1
tccgtatatcatgaacacaataatagacaaccccttttaaattaaatcaactttaggacaaaacttgacccttaaaaacagatagtaactccaactccaagtcacattggtgacaaagttagaaacaaggagaaagaaagaagatggcaggaaagaaaatcccagatgtgttgctgaattcaggacacaaaatgccagttataggcatgggaacttcagtggagaatcgtccatcaaatgagacccttgcttctatctatgt

SEQ ID NO: 21057 - DNA, 234 bp, Glycine max
  Clone ID: 700870678H1
gtccgagaatggaaacagacctaaacagagggtaacatgacaagcaaacaccatggtgattaagtctgtgttgttcagcttcattttccccccgccaccttctctggtggtttgggggttgactgtgacaagcttcctgatactggctaatgctttcttgtcagagattagagggaagcatttgaactattcatagttttggactgctaatccctctgcagaaaagcaggtcaa

SEQ ID NO: 21058 - DNA, 242 bp, Glycine max
  Clone ID: 700870680H1
tgcacttgcttcagaaaacgcaagcgagcattcttccaaatactcgaatcgtctgtctctagtacctcaatcaaggtgatcattcttctcaaccccgattcttcattgatctcatcacaaaacccatttattgaatctgaatagaaagaaccccacgattattatttcatacaattgaacttcttcagcgttgttcgtgaactccctcaagttaaagacactacctttctggctttgttctc

SEQ ID NO: 21059 - DNA, 231 bp, Glycine max
  Clone ID: 700870684H1
gcaagcacaatggacaaaacaagatatgagaatgccattaaagtttgtgctttagataaagatattgaagactttagccatggtgatcttacagaaataggtcagcgagggattaacatgagtggaggacaaaagcaaaggattcaactagctcgtgcagtctacaatgacgctgacatctatctcctcgatgaccctttcagcgcagttgatgctcacactgctgctatt

SEQ ID NO: 21060 - DNA, 231 bp, Glycine max
  Clone ID: 700870685H1
attgatagttgcattgagagtttcaatttaggtgatattgacaaatacaatgatatttatttttagagttacatttttttgaagggcagaaattgtagtgaaagcgataattctagtactagtataatcactagtacgaatgatacaaatgagagtgattccactataggtgagagttaaaatagtctcgatgaaagtcaaaaatataagcatttgtggcttgaatgcgaa

SEQ ID NO: 21061 - DNA, 232 bp, Glycine max
  Clone ID: 700870686H1
atttcttaaaatatcctatatacgtaggtgggaacaggggaaggggtcagatttatcttgacgggagcaagagtaataataatgtgtataatgctacagcagcgggtatggtaaaaaaaatcatacgaaaagaaaaagggggatacgaaataactatagtggatgcattggatgggcgtgaagtgattgatattatacctccaggaccagaacttcttgtttcagaaggtga

SEQ ID NO: 21062 - DNA, 232 bp, Glycine max
  Clone ID: 700870687H1
caacagcgccggacacgacagcgtcgttccagttcaaaaaccctctctcgcccctcccctaatcaataatcaccaccaccaccaatcagaaacttgcttcgacgtcgatttttgtcgctcgaagctctcctcctttaactacccttccaattctcttagccaaagcgtttcgtcgtcgtcgcttgatgttggagtggtgccggacgggaacacggtgtcagacatgtcgtat

SEQ ID NO: 21063 - DNA, 231 bp, Glycine max
  Clone ID: 700870688H1
gtgagcacaagcttggttctagtagttttagtagctctcacagttcaaattttctacatttcacccatagatccagttttgctggatataaaacctgctccttcaaccaaagacaatcaattacagaatatcattaagcttggagaaggacttttgaaggaaccagaagatgttgttgtagataaagaagggactctctatacagctactcgagatggttggattaaaaga

SEQ ID NO: 21064 - DNA, 231 bp, Glycine max
  Clone ID: 700870689H1
gagagagtagacagagaagagtgtgtgtgcgtgcgtgtgttttttttttttttatcacctgagaacccaaagggaacggttaactcggccatttaaacccccccaaaatttccaattgaactccttttaaggaggataaggaaagtttgatcttccaggaaaaaggacgaaggggaaaaaaatgggattttttttgggggtttcccaatggtaaacctggaaatccaaaga

SEQ ID NO: 21065 - DNA, 229 bp, Glycine max
  Clone ID: 700870690H1
aggaaattgaagaacaggggaacaataagaatgttggaatgaatcttgaggaagttattgaagaatgcaagctcttctactttgcagggcaggacaccacttcagttttgcttgtttggacaatgctattattgagtaggtaccctgattggcaagcacgcgcaagggaggaagtctcacaagtttttggcaaccaaaaaccgacttttgatggactgaatcaattaaa

SEQ ID NO: 21066 - DNA, 230 bp, Glycine max
  Clone ID: 700870691H1
aattgaagttgaagtcttgcccttctctcttcaactccaaacacaagacatcatcatccatggctgcctccgtctccactgtcggagctgtcaacagagctcttttgaacctgaatgggtctggacctggggtttcagctcccagttcatccttctttgggagcagcttgaagaaggttattggctcaagggtccccaacacaaagatttcctctggaagcttcaagatt

SEQ ID NO: 21067 - DNA, 232 bp, Glycine max
  Clone ID: 700870692H1
cagggagatgggtcatctctatgctttggactttgatggagttatctgtgctagctgtggtgagacagctatctctgctcttaaggctgccaaattgagatggcctcccttgtttgatggtgtggattcaaccatagaagattggattgttgaccagatgattacagtacggccagtggtggaaactggatatgaaactcttttacttgtgaggttgttgcttgagactaga

SEQ ID NO: 21068 - DNA, 233 bp, Glycine max
  Clone ID: 700870693H1
gggcctggctatggtgcatctacaggtggcacttatgatgcacaaaggggtgctacttatgacactcagaggttgactggttccaatgcatttagaggatctgcttatgattccaagagaggttcggggtatgatatgcagagagcacctgcttatgatgcacctagagctgctggctatgatgcacagtcaagaggggttgctggtcctcatggacatgctcggccaatgaa

SEQ ID NO: 21069 - DNA, 235 bp, Glycine max
  Clone ID: 700870694H1
ccaaagaatgctcttgggaagcaatacaagaagatgttccaaatgaatggggtaaagctacattttacagaaaacgctctaagatcaattgccagaaaggcaatatctaaaaatactggtgctcggggattacgatcaatattagaaaatgtgttggtagatgccatgtatgagattcctgatattagaacaggcgatgatgttatagatgctgttgttgttgatgaagaggctg

SEQ ID NO: 21070 - DNA, 238 bp, Glycine max
  Clone ID: 700870695H1
gagggttgtctttatagatccagaacggcaaagttctgttttggaaaaactgagaagacaattggctgaagctgatgccgcagttgaagctcggaagacgcctcccgtggaggcaggtcctcgggttgctgccgaagggcttgtaattgatgaatgtaaagagagaagggagaagtacttggcccggcaacaagttcaagcagtagattcagtgtaaaacgcaatttgttcttccagc

SEQ ID NO: 21071 - DNA, 146 bp, Glycine max
  Clone ID: 700870696H1
aattgtttaaacctaattctcatttcttcatcgttcgattcttctcctcctaaagatgcagatcttcgtgaaaactacgaccggtatgaccatcacccttgaggtggagtcctccgacaccatcgataacgtgaaagctaagattc

SEQ ID NO: 21072 - DNA, 193 bp, Glycine max
  Clone ID: 700870701H1
tagagatccttatgcactctagaatatatgggcaactagccatcttcttcagttctctgtttctttctctctgtttttgcagcgttttgaagcctcttccaagtgtctcttactctagatttccctctggttcattctctctagctgctgttgagttcatcttccctcttaactcataggtctatttgatggg

SEQ ID NO: 21073 - DNA, 237 bp, Glycine max
  Clone ID: 700870702H1
ctgcacgctcgcgcacgtaatctcggtttacagctgtagtcgattctccctttctttaaccataataatcatgaaatatgcatatttctaaaaattgcttctacttcttgccactagctctgtaaaattttgtaggattatatagtctcaaatagtattacattactatctgtaaaatccatataagaatttcatggaatatcagattagttctccaataaaagttccatttagcac

SEQ ID NO: 21074 - DNA, 257 bp, Glycine max
  Clone ID: 700870703H1
ctcgagctcgagcgatactctgtatcatttcatttcgataatcatccatagttactgaagaaaatggcaaccatctccgctgctatcacaaccccatcgatcacccgcgcatgtctagtgcaaaaacgttctcttgggttctcatctcccgttcttggtttgccagcaatgggtaaggtgggaagagtgagttgctccatggaggaaaagccttcttctgtgaaggaaagcagctcaagcatgttggggatgggggc

SEQ ID NO: 21075 - DNA, 257 bp, Glycine max
  Clone ID: 700870704H1
cagccgactactctgagacaatgaaggctctggcgtggtacggcaagaacgacgtccgaatgattgacacaccgaagcccaagattctagaggatcgtgacgttatcgttaaggtcactggttccacagtctgcggttctgacctgcacttgcttcacggcgctgtcgtggagatgcaaaagggcgacattctcggacacgagttctgtggtgtcgtagacgagtgcggccccggtgtcacaaagttcaagaagggt

SEQ ID NO: 21076 - DNA, 255 bp, Glycine max
  Clone ID: 700870705H1
agttgatgcatctagaaaagcaagtttacgggctctaaaacttcttgcgttaggccttttccttcaaggaggttatttccatcgcgtgaatgatctgacatttggagtggatataaaacagataagatggatgggaatactacagagaattgcagtagcatatttggttgtcgcactgtgtgaaatttggctcaagagtgatgatactgttaattcaggaccatccctattaaggaagtatcgataccagtgggc

SEQ ID NO: 21077 - DNA, 256 bp, Glycine max
  Clone ID: 700870707H1
ctgagttttgacctacaacactctccaatcccctcttgtgtgttgtagccgccccgtgatcatcaatggcggaaactgctgacaaatctcaatctctcgccgaggaatattatgtgaatgacaagcaaacaactgtagttgaaaaagctgttgaggtcaaagaagttgaaaacccaaaggtagctgcttctgaggaaccagttgctgagaaaactgtggaagaaacaactcctgttgcccctgcagttgctcagga

SEQ ID NO: 21078 - DNA, 70 bp, Glycine max
  Clone ID: 700870708H1
ctagttctagaatcgcgagcggccacccttttttttttttttaaatattgaaagggacaaatttattaat

SEQ ID NO: 21079 - DNA, 260 bp, Glycine max
  Clone ID: 700870709H1
ggagctcttctccattggttcttcatctgcatgcacacacttgcatagttttggaaaccaagaatttttgaagggtagcatcaacaagaagttctggaaatggagatcaccaatgtcagcgagtatgaagctattgcaaagcagaagttgccaaagatggtgtttgactactacgcatctggtgcagaggaccagtggactctgcaggagaacagaaatgccttttccagaattttgtttcggccacgtattcttattga

SEQ ID NO: 21080 - DNA, 254 bp, Glycine max
  Clone ID: 700870710H1
gtctgggtggatgactgatgaggaatttgctagagaggtgattgccggtgtaaacccaaatgtgatccgtcgtcttcaagaattcccaccaaagagcacacttgatcccacactctatggtgactaaaccagtaccataacaaaagaacaattggagattaacatgggaggggtctagtagaagaggcacttagtactcagagattattcatattagattaccaagatgcattcatcccatatttgacgaggat

SEQ ID NO: 21081 - DNA, 255 bp, Glycine max
  Clone ID: 700870711H1
gacagttggatgatggcggttcatgtacggatttagtgctccagttgctgtattaatggggcttggaatgtggactctccccaattctccacggtggttgcttcttagagcagtgcaaggaaaaggttcttttcaagatttgaaggaacaggcaattgcttccctgagcaaattaaggggccgaccactgggtgacaaagaatctgagaagcaaatagaagagacccttgtctcattgaaatctgtctatgcaga

SEQ ID NO: 21082 - DNA, 260 bp, Glycine max
  Clone ID: 700870712H1
ctcgagcgatactctgtatcatttcatttcgataatcatccatagttactgaagaaactggcaaccatctccgctgctatcacaaccccatcgatcacccgcgcatgtctagtgcaaaaacgttctcttgggttctcatctcccgttcttggtttgccagcaatgggtaaggtgggaagagtgagttgctccatggaggaaaagccttcttctgtgaaggaaagcagctcaagcatgttggggatgggggcatctttgat

SEQ ID NO: 21083 - DNA, 237 bp, Glycine max
  Clone ID: 700870677H1
aatggttttccacttttgactaaaaaaagaaaatattttgagaaagataaaaaaaaaactaatgaatttcaaaatttttctttggccaaaatatcgattagaagatttagcttgtataaatcgatattggtttaatacccataatggaagccgtttcagtatagtaaggatacatatgtatccgcgaatgagaattcgttaatccaaatttgtcttctatttaccatatttatatgg

SEQ ID NO: 21084 - DNA, 234 bp, Glycine max
  Clone ID: 700870642H1
aatatttaccgccccgccggagcataagaagaaggatccgtgtcacagtcactgctcatcgccatgtctcgggttgataacagaaattcctcagccaccaagcgtgctaggactgatggacaacttgtaacatgcgtaattgcactcaaccaaggccggctgatcataattacaaatctgctgccaagcctctacaagctccacagggttattcatcctcagctccttacttag

SEQ ID NO: 21085 - DNA, 240 bp, Glycine max
  Clone ID: 700870644H1
gtagattctattctcctcaagcaaaacctatagctcccccacactcctccagtacttgaataaaagctaaataaatattaaagcctttccttcatcaaggtactgtttgatctttgaatttcagtcctcaaagattggaacaacaggaacatgtgtactctcacaactgttcctgtgctcccttctaagcttaacaagccttcgctttctccgcaccacaattctctctttccctactgt

SEQ ID NO: 21086 - DNA, 239 bp, Glycine max
  Clone ID: 700870646H1
cattgagatttttgtcttgtttcttagggctgtctatttggtgattttgctctctccttgtatagctatggctcctttagttgatttttttggcactcaatttagaaaaacatggattcatgttgttcgagttacacttgaaaaagctggtccagcattcattaagtggggtcaatgggctgcaaccagacctgatctctttccaagggatctctgtgatgaacttgctgaatttcaaa

SEQ ID NO: 21087 - DNA, 242 bp, Glycine max
  Clone ID: 700870648H1
caggacctggcattcgctttttccagctatatgtgtacaaggacaggaatgtggttgctcagcttgtgagaagagctgaaaggcctggattcaaagccattgcccttactgttgataccccaagactaggacgcagagaagctgatatcaagaacagattcacactgccaccatttttgacattgaagaactttgaaggattggaccttggaaagatggacaaagctgatgactctggactt

SEQ ID NO: 21088 - DNA, 238 bp, Glycine max
  Clone ID: 700870649H1
cagattcaggtacattactgtgggaaatgaagtgaagcctatgggactcatttgcacagtttgtagtgcctgcaatgcaaaacatccaaagagcaatttgtaatgctggccttggaaaccaaatcaaagtttccactgccattgagtctggtgcattggcagaatcataccctccatcaagaggctcatttaggtctgattatagaacatcatatcttgatggtgtcatcagattttt

SEQ ID NO: 21089 - DNA, 236 bp, Glycine max
  Clone ID: 700870651H1
gctcgagtcaggatttagatttggtatttgaccattcacactaataatgaggctggtactcctctatgaagttctctaccacctcctgatcctggcccttgcacactgcgcttagctttggcaaattatgcagatctcttgaatcccccacgcaagctgtgcttctcgttcaggcttctttagtggctctggctgcacatacttcggaacccagtgaagcggatagattaacattc

SEQ ID NO: 21090 - DNA, 234 bp, Glycine max
  Clone ID: 700870653H1
gatcttaaggacattgattacaagtctggggatgtttgtggtgtgcgtgtgcagtaccctggcactgagggagaggttttggactatggagagtgtgtgaagaaggctcatgctcatgaggtgaaggttgtcatggcaagtgatttgttggcactgactgtgttgaagcctcctggggaacatggggcagatattgttgtcggctcggctcagcaggttcggggtgccaatggg

SEQ ID NO: 21091 - DNA, 233 bp, Glycine max
  Clone ID: 700870654H1
gtttagttatctactcttttctgcatgtttgttctctcaacgactcctccgcgaaagagtattatccaatattttggttgggttgaatcccggggttgaagtgttgcagacatcacggctattctcagagtgtctcgctccctcattcatgtccgatctgtacgacggacgacgggtagttgcgtaactgccgttaacccttcgccgcacggtgggcgtcgtgctttgccttc

SEQ ID NO: 21092 - DNA, 235 bp, Glycine max
  Clone ID: 700870656H1
gattatgttttgtacactagaacaagctacactatggttttccccagaaaagcaaagttggcaattttctccattctgtaaaatataaagcaagaaagaattagtaatgaatatataatactctctccgtcccaaaatgactacagttttagtcttaaaaaaaatccaaattgaccgatgttctcattttttaatgagatattaaaacatctattccaattttacccttaataaa

SEQ ID NO: 21093 - DNA, 231 bp, Glycine max
  Clone ID: 700870657H1
gtatattgcgcctattggcttgctacaatatcctctctttttctctccgcactctccctgatgccaaggttgagaggctctatggtctcgcccccgttgccaagtacttggttaagaacgaagatggtgtctccattgctgcgctcaacctcatgaaccaggacaaagtcctcatggaaagctggtactatttgagagatgcagtccttgaaggaggcattccatttaaca

SEQ ID NO: 21094 - DNA, 152 bp, Glycine max
  Clone ID: 700870658H1
aaaaagactaggataagaacgaaaaaaaaagtgatcccccttttcttgtttgtcttatatccatatttcatggagatagaattcatgtcataatttaaaaaatgaacatagtataatctcttattcgataatcgaaaatgtcatgatgggag

SEQ ID NO: 21095 - DNA, 229 bp, Glycine max
  Clone ID: 700870659H1
ctttatcttttctctatagctccgtccaaacatgactctccgcaaccaccaagagctcttggttgctcttgcaattctatattttcttgccacctcactcccttcagtttcagctcatggcccatatgcatgggatggggaggccacatataaattcactacttaccaccctggccaaaactacaaaggtttatccaatgtcaaaaactacttccaccatctcggctac

SEQ ID NO: 21096 - DNA, 236 bp, Glycine max
  Clone ID: 700870660H1
tggctctctcgcacctctgtcgtggttcgaggaacctcttctcctcctcttctcctctctgcttcgcttctcttcccgccaccatcaggatttctttccaatcctcttcgatcttgttctcttctcccgatttcactgtttcgcaccgtcgattcggttctcgagctttccagaagaaacaaaagaacaagaccatcctccccaagaccgaagacctcgatctagaagccctgaaa

SEQ ID NO: 21097 - DNA, 237 bp, Glycine max
  Clone ID: 700870661H1
gttcagtcataccatccacactagatacaatttcagtaatctgtaactaactctactgacttgaaggacgctacaatgaactcaatagaatgcattgaggagctatgggtcatcttccgagggatagatgggaagccagagtgtgatcagaacacctgagcatacagataatgttctcgacaactaggcacggtgaatgagggtcgtatccaatgatctaaacatggctgggaatat

SEQ ID NO: 21098 - DNA, 238 bp, Glycine max
  Clone ID: 700870662H1
aattattggagacagacaaacgggtaaaacagcagtagccacagatactattctcaatcaacagggacaaaatgtaatatgtgtttatgtagctattggtcaaaaagcatcttctgtggctcaagtggtgaataccttacaagaaagaggagcaatggaatacactattgtagtagctgaaacagcggattctccagctacattacaatacctcgccccttatacaggagcagctctg

SEQ ID NO: 21099 - DNA, 243 bp, Glycine max
  Clone ID: 700870664H1
ggcgaactgatttcgttatcagaacaagaattggtggattgtgatactggatataaccaaggatgcaatggaggacttatggactatgcatttgagttcataatcaacaatggcggcattgattctgatgaggattacccataccgtggtgttgatggtagatgcgacacatataggaaaaatgctaaagtcgtttctattgatgactacgaagatgttcctgcctatgatgagttagccttg

SEQ ID NO: 21100 - DNA, 233 bp, Glycine max
  Clone ID: 700870665H1
agaggctgtgggcgattgtgaactttattctggcaattgggttcggaatgacggtggtgatcaccaaggtggcggacaccagcgcaagatgaatcccgccgccgtgggtcacccctccgaaggggtggtggttgggtccatggttttctttggggttctcggagttcctcttgcggtaatgttcttctctcttctctctcgacaactacgcctaaatcactgcgtttttttaa

SEQ ID NO: 21101 - DNA, 230 bp, Glycine max
  Clone ID: 700870666H1
cagcactatagattttcgagggcaagattttgagttaattccatttggtgctggtcgtagaagttgcccgggcatgcttatggcaactgcctcattggatcttatacttgctaatcttctttatttatttgattgggaattgccagcagggatgaaaaaggaagacatcgatactgaagtcttgccaggacttgtccagtataagaagaatcctctttgtattttggcca

SEQ ID NO: 21102 - DNA, 230 bp, Glycine max
  Clone ID: 700870667H1
gtcagtgggaattccaagttggaccttcagttggaatctcagctggtgatgagatttgggcagctcgttacatcttggagaggatcactgagattgctggtgtggtggtttcctttgaccccaagccaattaagggtgattggaatggtgctggtgctcacacaaactacagcaccaagtccatgagagaagatggtggctatgaagtgatcagagcagcaattgacaag

SEQ ID NO: 21103 - DNA, 232 bp, Glycine max
  Clone ID: 700870669H1
cgaaatcctcggcgtttcgaagaacgcttcgccggatgatttaaagaaggcttacaagaaagccgccattaagaaccaccctgacaaaggcggtgatcctgagaagttcaaagagcttgctcaagcctatgaggttctgagtgaccctgagaagcgtgaaatttatgacacatatggagaagatgctcttaaggaaggaatgggtggtggtggcggtggccatgatccattt

SEQ ID NO: 21104 - DNA, 233 bp, Glycine max
  Clone ID: 700870670H1
gatgccatggagttagatctcagttcgatgaagtctgtcaggaaatttgcatcagagtttaagtcctctggtcttccattgaacatcttaataaacaatgcaggaattatggcttgccctttcagtctctctaaagacaaaattgaactacagtttgccacaaatcacataggtcattttctcttgacaaatcttttgttggacactattaaaaaaacttcacgtgaatcaaa

SEQ ID NO: 21105 - DNA, 234 bp, Glycine max
  Clone ID: 700870671H1
atggcatctgcgacgcgtctggtgcactgcgagctgcgctcggcgaggcccgcggttcggccgagggaaccggccggtccggttcaggttacgatccccaaacccaaacccaaagcggcggaggcggaaggcgcgaacatcgttttgcagccgcggttgtgcactctcagatcctacggttcggatcgagccggggtgcttatcaagactcgcaaggagggtgaccatgatgac

SEQ ID NO: 21106 - DNA, 234 bp, Glycine max
  Clone ID: 700870672H1
ccatccttggctggcaaggatggggaagagagagccatggaggaggctgctgccatttttaaaactctcttccccatccatggctggcaaggccgtgaagctgggcccatcagcccccgaagtcgggagggtcagcatgaggaagaccgtcaccaagcaggcctcctccggaagcccatggtacggcccagaccgcgtcaagtacttgggcccattctctggcgagcccccgtc

SEQ ID NO: 21107 - DNA, 229 bp, Glycine max
  Clone ID: 700870674H1
ccacagtttcggaggagaagaaaatagtcgttcgagatggcccgtacgaagcaaactggacgtaagtccacaggaggaaaggctcctaggaagcagcttgcaaccaaggctgcacgtaagtctgcaccaactactggtggtgtgaagaagccacatcgttaccgtcctggtaccgttgctcttcgtgagattaggaaataccagaagagtaccgagcttttgatcagga

SEQ ID NO: 21108 - DNA, 228 bp, Glycine max
  Clone ID: 700870675H1
aggaaaagagagatagagagagaagaaaagctgttcagagaagagtctgaaatctgaatcataaataattggtttttgagatgaagaactgcgagttgtgcaagcttccggctcggactgtttgcgagtcggaccaggctagcttatgctgggactgcgacgccaaggttcatggagccaacttcctcgtggaaagacacacgcgcacgctccactgccacgcgtgcc

SEQ ID NO: 21109 - DNA, 235 bp, Glycine max
  Clone ID: 700870676H1
cagcactatagattttcgagggcatgattgtgagttaatgccatttggtgctggtcgtagaagttgtccgggcatgcttatggcaactgactcattggatcttatacttgctaatcttctttatgtatttgattgggaattgccagcagggatgaaaaaggaagacatcgatactgaagtcttgccaggacttgtccagtataagaagaatcctctttgtattttggccaaatgt

SEQ ID NO: 21110 - DNA, 236 bp, Glycine max
  Clone ID: 700870641H1
atactcattaaagtccacacacgctgcgcttgtgtgcactgtgtggaaacgaaacatggcaagagtggtggcactccaacagacccaactatctttctctaccttagcttcctctctatctgacttcagtggaaccagacttcggactcaacttcagttcaagagaaagcgatgccatccaaaagggtctttctacgtctccgcatcgagcaccaagaaaatcctaataatgggag

SEQ ID NO: 21111 - DNA, 239 bp, Glycine max
  Clone ID: 700870605H1
atcgaatcctttttaaacgctcaaatacaaatttctggcaccaaatcctttccactctcctcaattccattcatttcaactcaacaatctctcagatccgtcaaacaaaatataaaagatagaaaaccctagttctgtaaatatataaaggaaaaaagctttttgctggttttgaggcatagcattaaattggattctgattattcatggctgaacaagcattggaaggtagccaacct

SEQ ID NO: 21112 - DNA, 239 bp, Glycine max
  Clone ID: 700870606H1
cacgtacttccaatgtgagactcgagttacgtaccttacaaatgaatcctaacatcccaccacactccacagctccaatgtgcacgtgggttggctctgcactaaccctttgattagtcttggactcgtagacgaatactgcaatatctgcttcaccacctgcaccactcatttgtagctgagaatcatgtaggaaatctctgataccaattaataagaaccttgggagaaccacatca

SEQ ID NO: 21113 - DNA, 239 bp, Glycine max
  Clone ID: 700870608H1
aaccgacacaggtgggtaggtagagaatacctagaggcgcgagacaactctctctaaggaactcggcaaaatagccccgtaacttcgggagaaggggtgcctcctcatctataaaaatggaaatattttgaaaaaaaaaaacgttttttttttttcaaaatatttccatttttatagatgaggcgttatttgatttcgaaatccgattattatattcctaacccgaagtgctccttggt

SEQ ID NO: 21114 - DNA, 240 bp, Glycine max
  Clone ID: 700870609H1
tatagctccgtccaaacatgactctccgcaaccaccaagagctgttggttgctcttgcaattctatattttcttgccacctcactcccttcagtttcagctcatggcccatatgcatgggatggggaggccacatataaattcactacttaccaccctggccaaaactacaaaggtttatccaatgtcaaaaactacttccaccatctcggctacatccccaatgcaccacacttcgacg

SEQ ID NO: 21115 - DNA, 237 bp, Glycine max
  Clone ID: 700870611H1
cttaatttctatagagctgaagaaattaatattaatcaatcaatcaaaatggggttgtgcaaggtttcatttcctgtattatgtgcgttggggttggtcatgattgtgagtcacgttgccaatgctctggactcaccagcagattacgtcaatgcacacaacgctgcaagatcagaggtgggtgttcaaaacttggcttgggatgacacggttgctgcttttgcacagaactatgct

SEQ ID NO: 21116 - DNA, 229 bp, Glycine max
  Clone ID: 700870613H1
gcaatggtatagtgtgttgggcaaccatgactacaggggtgatgttgaagctcaattgaatccaatccttcagaaaattgatcctagatggatctgccaaagatcatttattgttgatactgaaattgctgagttcttcttcattgattcaacaccttttgtggacaagtattttcttaagccaaaggaccacaagtatgactggagaggagtgcttccaagggaaaaa

SEQ ID NO: 21117 - DNA, 231 bp, Glycine max
  Clone ID: 700870614H1
ctcgagccgtccaacttaatacatattctgatgcagcttcaagaaattccttttaagtgtaatgttcagtagctgtttacaggggaatgctgttttttactgttatgctgctaattacaatacacgatcattgatgttactggttgcaaatgttgaataggaatatagaaacatattgctacagtttgtctatgacgattagatgaatggaaattctaggaccttgaattt

SEQ ID NO: 21118 - DNA, 232 bp, Glycine max
  Clone ID: 700870615H1
gcaaaaatgattaatgaggataagatacatatccttgtcaacctaaatggttatacaaagggtgccagaactgagatatttgctatgcaacctgcacccattcaagtttcatatatgggattccctggaacaactggggctacttacatagactacttagtcactgatgagtttgtttcaccactacggtatgcaaatatatattcagagaagattgtacatctaccgcatt

SEQ ID NO: 21119 - DNA, 233 bp, Glycine max
  Clone ID: 700870616H1
aagcggctcgagcggctcgagtgcaattgaagttgaagtcttgcccttctctcttcaactccaaacacaatacaatagaaaccatggctgcctccgtctccactgtcggagctgtcgacagagctctgttgaacctgaatgggtctggacctagggtttcagctcccagtacatccttctttgggagcagcttgaagaaggttattggctcaagggtccccaacacaaagatt

SEQ ID NO: 21120 - DNA, 239 bp, Glycine max
  Clone ID: 700870617H1
acaatgtggaagagaacgggttttgaagaagaagcagttcaattgatcaactcagatttcagggacctaagtctagctgctaatagactcgcccatcatgccatcaaacttggtggcattggctttggagcctcttttttcggattgtttgctgccattgctgctatttatctgttgattttggatcgtacaaactggaaaacaaatattctcacagcactactcattccatacatttt

SEQ ID NO: 21121 - DNA, 237 bp, Glycine max
  Clone ID: 700870620H1
aagagacacgtggtaccctagctagagtgccattctgtggtttctttctttctttctttctgcatcacatcacaatttgctcttgcctcgtgtcctttttcttctttgctctccaaaaatctcacacacacaggtatctagcaaatgggttctcaccaacaagaaccatggctattggagaatgggaaaccaagggttttgaccaaggagaccaggcatggccgttctgcacacaga

SEQ ID NO: 21122 - DNA, 238 bp, Glycine max
  Clone ID: 700870621H1
aagaatttgcataggcgctgtttggagatggaaaaactattgtctctggcgcttgaagtttttcccgctaatcttcaggaaccgctcaatcagtatatggataagaaatggagacaccttgaagtcttacacgttgcattggccgcctcaaagatggcaggagtatgaacctattctgagctactgtcgcgaaaatggaattcatcttgttgcttgtggtacaccactgaagatctta

SEQ ID NO: 21123 - DNA, 238 bp, Glycine max
  Clone ID: 700870622H1
gttaggagatatcattccggctgacgctcgtcttcttgagggtgatcctttgagtgttgatcagtctgctttgactggagaatctcttcccgtaacaaagagcccttcggatgaagtgttttcgggatcaacagttaagaagggtgagatagaagcagttgtgattgctactggggtgcacaccttttttggcaaagcagctcatctggtggacagcaccaaccaagttggacacttc

SEQ ID NO: 21124 - DNA, 240 bp, Glycine max
  Clone ID: 700870623H1
ctcgagccgaaaaaaaaaatctcaaaataaaacaaccaaaccacacacttcacacccccttcaacatcctcagcaagtacaagaacaagaagaaacaatgtcttgctccaatctcacaatgttggtgtcctcaaaaccttccctttccgatccctccaatctctccttccgctctgtcctcaacccttttcagctcccttcacaaaacccaacttcatgcactccttcacgctcctcaac

SEQ ID NO: 21125 - DNA, 237 bp, Glycine max
  Clone ID: 700870624H1
aaaattgaaattgtgtctaactatcttaatagaaaatgcaaaaaggattagcaaaagtattatcgaaagtatccttaaaagtattctcaaaagtattctaagcctaacgaaaatataacaatttgtcaaattgctatttattaaatttaagttcaaaaagatagatgaattgagcgaaaatatctaatgatcaacaatttatatgaataatccaatgatttctgaaacaaccatttc

SEQ ID NO: 21126 - DNA, 238 bp, Glycine max
  Clone ID: 700870625H1
aatttcttagataactagatattaataaattaatttaattaaagttaacatatttaattaatttaaaattaaattttagtaaacaaaaatcttaaaagataagttataagataaaatataaaaaaattaaaactcaatactggtatgaataaaaatattcaacagttaagtttgtaaaaatttaagtgaaaaaaatttaaataaaatttattttaaaaatagattataaataaacaca

SEQ ID NO: 21127 - DNA, 236 bp, Glycine max
  Clone ID: 700870627H1
tcaagccctaatttcccctcatttccatggccacagaagagtacactgtcgcggtggaacccgctcccgaacctgcctccgccgatcctcccccggaggagaaggaggagaccaaacctgaagccatggctaagaaaaccaaggagcccaaacctaaaaaggtttccagacctcgcaaccctcccactcatccttcctacgaagagatggttaaagatgcaattacctcgctgaag

SEQ ID NO: 21128 - DNA, 233 bp, Glycine max
  Clone ID: 700870629H1
cacccttccccttctccttacttctcgctctctttccaaaacactccctttctctttccccttacccttcttctgtgtgtgatgatgtagatagagaataaaaagagaccagtgtgcagtgagaaagaggttggtcacttcttgtgtggctttgttttgttctttgtgttggaatttgttgatgggtgaagagggagaagaggtgtcaagagataaggaacagcaacacatgg

SEQ ID NO: 21129 - DNA, 233 bp, Glycine max
  Clone ID: 700870630H1
ttccggaatccttaacggctagacttctaaacgtggaagtgttggacgtgcgttccaaccagctaaactcccatcccaattccattggctgcctctctaagctcaaggttttgaatgtctcaggcaacttcatcgaatccctccccaaaaccattgagatttgcagagccttagaagagctgaatgcaaacttcaacaagctgagctagctgccagacacaatagggtttgag

SEQ ID NO: 21130 - DNA, 236 bp, Glycine max
  Clone ID: 700870631H1
ataagtcatcgcttgtgtgggaaaactgccttctattcatgtgcatcatcctgtattaaatatataacgtgttcgtttcattttcttgatgttaggggtggaaattttttatttttcatgtgctatttcatgtacagtattgttgtattgggatgtgaattataatagtactaattgtgattaaaaaccctaaacataataaaatgggctaagtagcaaattgtttcagtagtcat

SEQ ID NO: 21131 - DNA, 239 bp, Glycine max
  Clone ID: 700870632H1
cgaggacaaaacgcgatggttgacgtcgacgttggaacctcggactcgccgcagcgccagcacaacaacggcttcctcgtaacaatatcggcggttctggagctgctaccaaagcgcagagcagcgaacgcgaccatagaggatgagtggaagaaggaattgaagaagtcgcggccgaagaagcatctcagcctcataagaagcagagcgcttttcggtcacaaccacagcaacaagaa

SEQ ID NO: 21132 - DNA, 241 bp, Glycine max
  Clone ID: 700870633H1
ggaaattgtttgatatggtcaggtaaaaaggcaaaagcttgagatccgtttaaacagatccagttttgatccagaagaatttgctttgtacagaagatatcagctcaaagtacataatgataaaccacaaaatgtcacagagaactcatatcgtaggtttctggttgatactccattaatactagtttctcccactggtgatagcacagttcctccttgtggttgtggctctttccatcaa

SEQ ID NO: 21133 - DNA, 232 bp, Glycine max
  Clone ID: 700870635H1
gaacacttgatgagctaaatgggaacctcaatgatctaaatgatgttgagaagttgaaagctgtaggctcaaaatgcctaactttgttccgggagtgtcaagattcaataacgaaggtgcactggaaagcaccctgcttcagtggtgacggtgagtgggttgtaggtggttctgctaatgaaggggagcacaagatttacgtatgggatagagttgggcatcttgtgaagat

SEQ ID NO: 21134 - DNA, 193 bp, Glycine max
  Clone ID: 700870636H1
ctcgagcgaatcggctcgagaatacacaatttttacattactcaatacactacactgacacaatccccttccctcttctctttctatccaaattctccaccagccatggcagtttcttcagcaacagcttcctccaaactcatactattcgcccatgcatcatcatcctcttcccttaattccacaccctacc

SEQ ID NO: 21135 - DNA, 236 bp, Glycine max
  Clone ID: 700870638H1
gcggtcaggaccaaaccaaccagttcatggttctcaaccccaagttgcggcaggacctacacatcattatgggaagccccggggtccatctggtgggccaggaagatatcctcccaatgggaacccaggtggaggatacaatcacccaaatcgaggaggtcaaggtggtggtggttatggcagtggaccttatcctcctcaagggcggggggcaccttacgggtccaatagtatgc

SEQ ID NO: 21136 - DNA, 236 bp, Glycine max
  Clone ID: 700870640H1
ccaaaaccaggatgaaatgatcaagagtggtcggttgtctgaaccatacaagggaatcggcgattgtttcagtcgaaccatgaaggatgaaggggtgattgctctttggagaggaaacactgctaatgttatcagatacttccctactcaggctctcaactttgcttttaaggattatttcaagaggcttttcaatttcaaaaaggataaagatgggtactggaaatggtttgctg

SEQ ID NO: 21137 - DNA, 240 bp, Glycine max
  Clone ID: 700870604H1
gacatccaagactatctccaactcttcttcctctggttactctccatcatcgccgttagagccatactcaccaaactccgccacaagcctcgccgtccaccgggcccacggtccctccccatcatcggccacctccatctcatctccgccctgcctcaccagtctttccacgcgctctccacgctctacggccccgccgtgcgcgtcttcctcggctccgtccccgccgtggtcgtttcg

SEQ ID NO: 21138 - DNA, 246 bp, Glycine max
  Clone ID: 700870556H1
cgccggcggggcgcaggcgtgaccgccgacatcctgtggccgaatttgaggaagcggttctcgaagtcgctgctggacgatgatttcgaggcagggttcagagaattcgaggatgactcggaaatcgagatgtcgatgatgaggacgatgaagaggaggaggagttgaagaagaagaagccctttgggttctctcgctccaacaacaaggctgcttctaagcctctctctcgtggagcaacaactg

SEQ ID NO: 21139 - DNA, 246 bp, Glycine max
  Clone ID: 700870557H1
agaaaattatgttgaaccatcaccaggcatcaagctttgggatcctgattccttaatcatagtacacgattatgacaatgacagtgatcacatggatactgatgaaggcagatctttcagactaagagttatgtgatgcagttggacgcagagacacttcagagacttgctactgtacgatcgaaggaagctatatcattgattgaaaagcaaactcaggccctgtttggaaggccagatattcgt

SEQ ID NO: 21140 - DNA, 243 bp, Glycine max
  Clone ID: 700870558H1
tagaaacctctcagcccctctccgatcaaatggccaccgtaatcgacggcaaagccgttgcgcaaaccatccgatctgaaatcgccgacgaggtgcgccactctctcaaaaatacggcaaggttccggattagcggtggtgatagtagggaacagaaaagattcacagagctatgttggaatgaagagaaaggcatgcgctgaattgggaatcaaatccttcgatgtggaccttcccgaacaa

SEQ ID NO: 21141 - DNA, 244 bp, Glycine max
  Clone ID: 700870560H1
aaacggtggaatcaagaaattcagatctgctgcttactctaactgttctcgcaaaccatcctgatacacatccggattgatagttcgttgcatgcaaccatagttttattaggattttttcttctttgttttcaattaggtttttttgttgctctccttcaaactccatctttccaaatcctctctttgcgattgtgttttgatctgcttcctactgcgatagtttctctactgttacatggcc

SEQ ID NO: 21142 - DNA, 241 bp, Glycine max
  Clone ID: 700870561H1
tggaaaaatccatttaattgcagatgaaaaggttcaaggagctgtttttgatcttcctgaggagattgctaaagaattacttaatagggacataccacctggaaacaccgtttccaagatcaccaactaccttctttgcaagatgatgggcctccaagtgatttctatgggaggttctctgacagagatagaagtagccgaagaggttctacttctaggggaggttttagttctaggggag

SEQ ID NO: 21143 - DNA, 248 bp, Glycine max
  Clone ID: 700870568H1
tatcatcacatagagcttctgaaaatgtgcaaaggtgcagaaggagaaaagcaacatggtttctgcagcagctttctacataaagagagtgcaaccagaagtgctatatgttgtgagctatgtgggttaaggcttcattgtattgccaagctgatgatgcctacttgtgtaaaaaatgcgataaacgggttcatgaagctaattttttggcccttaggcacattaggtgctttctgtgcaacacatgt

SEQ ID NO: 21144 - DNA, 246 bp, Glycine max
  Clone ID: 700870570H1
caggatgctggaactcactatgccttcatgagctcctactagtagcttagcactggacttcgccagtacttggacaacaacatggatggattttacattgctccagctttgatggacaaacttgttgtcacattaccaagaacttcatgaccctgcccaacatcaaggttcctctcattcttggtatctggggaggcaagggacaaggaaaatctttccaatgtgagcttgtctttgccaagatgg

SEQ ID NO: 21145 - DNA, 242 bp, Glycine max
  Clone ID: 700870572H1
ctgaacagcagaggactatgctcggtgaagctttatacccgcttgtggatcagctggaacacgatgctgcagcaaaggttactggcatgcttctggagatggaccagcctgaagttttacatctgatgagtcaccagatgctctgaaggcaaaagttgctgaagccatggatgtgttaagaaatgttgctcaacagcaaactaacccagctgatcaactagcttcactctctctcaatgaca

SEQ ID NO: 21146 - DNA, 240 bp, Glycine max
  Clone ID: 700870575H1
gttgatccagctaagttaaatccatcaatcgtacatgccaaaagtttggagcaacttctttggttgaagaccaaaatcacattgtaatttgccaatagatgtgaaaaattcttttaaagtttaagctaagatgatgtacaagtccttttgagtactttcaagttgtttttggctatctaattagattggttgatcctaaaaaaaaaaaaaaaaaaaaaaaaaaaaaaaaaagacaagggg

SEQ ID NO: 21147 - DNA, 158 bp, Glycine max
  Clone ID: 700870577H1
gattataccataaaggagactgctctagtcattgatagtctcttggtttaagacttgatgtaatgcagtcttcatcgtctccaatattagtgtgtggagcttgatgtcttcatctggctttctaaatttaaacaattttgcatgcaaaacaataattg

SEQ ID NO: 21148 - DNA, 238 bp, Glycine max
  Clone ID: 700870578H1
tcttcatcaacgatcttgatgcaggagctggtcgtcttggtggaaccacccaatacactgtcaacaaccagatggtgaatgccaccctcatgaacattgctgataaccccaccaatgtgcagcctctggtatgtataacaaggaagagaatccccgtgtgcccatcatcgtcaccggtaacgatttctccacactctatgcacgtgtcatccgtgatgggcgtatggagaagttctac

SEQ ID NO: 21149 - DNA, 244 bp, Glycine max
  Clone ID: 700870580H1
gttgagtctgttcagccaactaaggtcgattccccccctagcagtgtgtcgacaaatggggtttcttccccttctgtgccagcaaactcagaatcatctgatgctgctgctgctgcttctaagtccccattcaggagcaagtttcaggcaccaaagaggacaaaaatgtggatgccaaagatggtgagagtgattcctcatgtggggttcctattgattcattccctaagcctgttgtgagtgt

SEQ ID NO: 21150 - DNA, 227 bp, Glycine max
  Clone ID: 700870581H1
tggaccacctagacatccctgtggccaacaatgcttgggtctatgccactaagttttccccagggtcttaaaatgtatatgacttcttcttccctaatccctatgatcccatccctcgtgcttaccttgtgatttatgtgtagattatatgatcacaataattgttggattagtgtacttcttaaggactaaggttcaatttaaacctcggatgtctcttgtttgtt

SEQ ID NO: 21151 - DNA, 247 bp, Glycine max
  Clone ID: 700870582H1
cgagaaatggcgatggcaatggcgcttcgcaggctttcatcttcaattgacaagcctctgcgccctctcttcaatgccggttccctctactacaagtcgtctttgcctgatgaagctgtttacgacaggagcgacccggagttacatggccgaagcagttgaatgctccacttgaggtcgtggatcctgagattgctgatattattgagcttgagaaagctaggcaatggaaggggctagaattgat

SEQ ID NO: 21152 - DNA, 247 bp, Glycine max
  Clone ID: 700870583H1
ggcttttcttctatccaacctgaaaccctcactgctaccccaaaccaaatcaaaacccattcctcaaactccttcaccatcatcagcaaaacccacttctcaaagtccttcattgttcttcttcactcatctgctccactttccgcactccaaagttccactgcacaggttgctcaggggcacacaccaacaacaggtgccagatacgagcttcagcagcagaaggatgagttttacctcaatcttg

SEQ ID NO: 21153 - DNA, 243 bp, Glycine max
  Clone ID: 700870584H1
gttgaagcgggaaacaatggcaattcccatgttgagggctgcaatgatttctcattctcaatctcaaccactcattcattccatatctgctatttattaaaccgctaagaggaggaagagagtgtgttctcttcttcttcttcagaacttaaccctgtaattcggtgagttacacttcattttctgattctttttgtttttttggcctttcttaaacatggtttttggcttgctttctgttgc

SEQ ID NO: 21154 - DNA, 238 bp, Glycine max
  Clone ID: 700870589H1
aatggcatcaatgactagcttacgtggttcctctcaggctgtgttgtaaggtagccttggctccacacgcttgaatgcctggagtggaagcagggtggcctcagtcacacgtgcagggttccagttagagcacagcaacaacaagtgaatggtggtgaggtacaaagtagccgtagggcagtgctttcacttgttgctgctggtttgaccactggctcttttgttcaagctgtgcttg

SEQ ID NO: 21155 - DNA, 228 bp, Glycine max
  Clone ID: 700870590H1
cttggtggaaaacagattgtgcatctaattccaaattcacccataaaaatacttccttttgctcaccagccatatattatgatggagggagatgagaatattcaagcatctcaaagggaaaatatgttgaaagcttcaactgctcggaggcaccaaggaagaaaagcaagaagatagaaaacaagaggaggtttagtgatgaacagataagatcactagaatgcatat

SEQ ID NO: 21156 - DNA, 239 bp, Glycine max
  Clone ID: 700870591H1
ttaagatccaaattttatccattaatagatggagcgtcgatcgcagctagatctagagggaaattatgagcattacgttcatgcattacttccataccaaggttagcttggttaataatatcgcccaggtattaattacacgaccttgactatcaactacggattggttgaaattgaaaccatttaagttgaaagccatagtgctgatacctaaagcggtaaaccaaatacctactaca

SEQ ID NO: 21157 - DNA, 200 bp, Glycine max
  Clone ID: 700870592H1
atgaatctgatgcaggcggttcgctacgacgcctacgggggaggtcctgccggcctcaagcacgttgaagttgccgttcccagtccaaaggcaaatgaggttttaatcaaactggaagcattagcattaaccctattgattggaagattcagaagggtcttctccgtcctttatttctccccagaacctttccccacata

SEQ ID NO: 21158 - DNA, 235 bp, Glycine max
  Clone ID: 700870593H1
aagatatggttgaggaatggtttgattgtgttgatgaggaggattcctttgaggaagtttctttaagtgcagcacttaatggtgttgagggtttggactatatggaaagaattcctcttccacatctgagggttttcctcatgtgctttcacgcaaaaatggtgccaaaggcaaaagaagatttgtttctggggatggtgaagagatgacattgattccgggaaccagtgttgaa

SEQ ID NO: 21159 - DNA, 236 bp, Glycine max
  Clone ID: 700870594H1
ccagccagcagtccccattgctgtgccagtgaagcattcattcattcatcttctaaaactttgatcatttcgtggatcttctgattcttcgatctcgattctggttagggtttacggtttctgaagggaagagaagtttgcccagaatggggattctggttccgcttttcttccacgtcgtcgctttcatttgcaccgttgcagctatcgctttggccgttcttcacatttacagg

SEQ ID NO: 21160 - DNA, 241 bp, Glycine max
  Clone ID: 700870595H1
ctgtaagccttgctttcaattttctccttacaaaaaaatcctttcccttctctagtccccataactagcaaaagaagccaatagaaaactgttccatatagtttcccattcaaacttgttttattttcattttaactcaatggagaatagaacaagctctgtactcccacctggcttcaggtttcaccccactgatgaggaactaattgtgtactacctttgcaaccaagcctcatcaagg

SEQ ID NO: 21161 - DNA, 233 bp, Glycine max
  Clone ID: 700870596H1
caagataagtgtctaaccttagtaacattgccacatattgtgttcattttggaattgtgccactaaaattctattcaattcatctatggctgcctcttcttatgctatgcaatcaatcctggaaaccctttgatccgcatttccagcgggtctagggtgaaccaatttggcgttcctgctttgcacatgagaaggaatgttggcctgagagttaggtccatggctaaggaaga

SEQ ID NO: 21162 - DNA, 242 bp, Glycine max
  Clone ID: 700870601H1
atcaaagttcaactcttgatacttaatttaactggtttcatgcttatggaggttgctgtggaactggaagatgacctattttttgcagacttgagcaagcaaatttctcaactaattatggatgaagatgaagacccccttcctacttgtcctcctgattctcttcagacttttcctggatcaatctatcctcctccacagtctggtttcctctacgagcaggctttgataagacaaagcaa

SEQ ID NO: 21163 - DNA, 239 bp, Glycine max
  Clone ID: 700870603H1
ttctttttaagattaagagttaagacagaggacatcccgttaatctgtatgatgtcagaatttgttctatgctagactactcgatctggtatttcagattgttcctgcaaaacggcaaaagagattgctaaattggtattacaagtccaagccaattactattcaaaagagattggtaatttggtgggattataagtccaagcctctctggttattcaaaaatatttatctgtacagca

SEQ ID NO: 21164 - DNA, 250 bp, Glycine max
  Clone ID: 700870555H1
cgcaagtattttcagcagttaatcagcgccgttgattactgccacagcagaggtgtatcccaccgtgatctcaaaccagagaatctactcctcgacgaagacgaaaaccttaaaatctccgatttcggtctctccgcgctgccggagcagcttcgttacgatggactcctccacacccagtgcggcatacctgcctacgtggcaccagaagtgttaagaaaaaaaggctacgacgggtcaaaagcagata

SEQ ID NO: 21165 - DNA, 259 bp, Glycine max
  Clone ID: 700870519H1
aaaaaaattgcttgaagattaccgaatcggggagctcatcaccactggctacacctcagactcatcgcccaacaactccgtgcatggcaattccgaattcactcatttggcccctattaaggaaactacaacaccaccacacgtatgtggctctcaacccacgcgagaaaatcccatgcaagctcgtgtcaaagacctccatttctcatgacgcgaggctattccgttttgcattaccctcagaggaccaactcttggg

SEQ ID NO: 21166 - DNA, 257 bp, Glycine max
  Clone ID: 700870521H1
aggttgtgaaagcagagaagtgagatacactaagttatcctcataaatacactctaattaggtggcaagataagtgtctaaccttagtaacattgccacatattgtgttcattttggaattgtgccactaaaattctatcaattcatctatggctgcctcttcttatgctatgcaatcaatcctggcaaaccctttgatccgcatttccagcgggtctagggtgaaccaatttggcgttcctgctttgcacatgaga

SEQ ID NO: 21167 - DNA, 256 bp, Glycine max
  Clone ID: 700870523H1
tgcgtttcgattcttcttccgaatcagagggattctggatttcttgttgaagatgcgacgctcttctgcatccaaaaagtcgggtcaatccaattccactcccaacgccgcctatctcttccgctctgcttcaagtaggcaagctcgaaggaatcagaacgaattgatagtctattctattcatatgccaatgggtctaccgggttgattgaaaggaatcgaaacactttgtgctgatatggaggtggatcataca

SEQ ID NO: 21168 - DNA, 255 bp, Glycine max
  Clone ID: 700870524H1
aaagacagagcccagcgataaagcaaaagcgcatttccgctgttgtatgtgtgtgtttgcgatgccaggtggggcaaccgtctgctccggtcaccggtttctctgcgctgttctgcattcgactcgtccccgactcactacccgactcggtcgcgacccgttccggttcaacttggatccgtgtttgtgtcgaatggtaatggcgatagtaagcggttcagctccaagttgagcctcattcccagagccgttgat

SEQ ID NO: 21169 - DNA, 254 bp, Glycine max
  Clone ID: 700870525H1
aaattagttcattctctttgcgcagttccctacctctcctttcaagatgcagattttcgtcaagaccctcaccggaaagaccatcacccttgaggtggaaagctctgacaccatcgacaacgtcaaggccaagatcaggacaaggaaggaattcccccggatcagcaacgtctcatcttcgccggaaagcagctcgaggacggccgtaccctcgccgactacaacatccagaaggagtcaacccttcaccttgt

SEQ ID NO: 21170 - DNA, 253 bp, Glycine max
  Clone ID: 700870528H1
ctctcgagccgaatcggctcgagagcggccaaaggtatctatccaatagtagatcctttagattcaacctcaactaaactacaacctcgaatcgttggtgaagaacattatgagactgcgcaaagagttaaacaactttacaacgttacaaagaacttcaagacattatagctatccttggcttggacgaattatccgaagaagatcgcttaaccgtagcaagagcacgaaaaattgagcgtttcttatcaca

SEQ ID NO: 21171 - DNA, 242 bp, Glycine max
  Clone ID: 700870530H1
gcctctgctatgttgactggtgcttctgctgttgcaggtacatttactcatgtatatattatgcaatttttaatcttaactgcctttttctctttgtttgtcctagtatggaaaattcatatcaaattgcatgtgttaacttggtaagctttgttcagttattatatgaatatatagcctttgaggattggtttcccatggtgtgtaattttgtctatctttttacttagtgatataattct

SEQ ID NO: 21172 - DNA, 252 bp, Glycine max
  Clone ID: 700870531H1
aaagatctgaaaaaccatgaacttgaaggcaggccggttgcttcattgcataattgaagttgttacttttaccctagtattatttgggtaccaataccaagataatgtattttcttcttaaaaaaaaaaaaaactatagccaaactgccaaagtcatattctctcgtctctttctctatgggggtatctttggtgttagtagcttaattaggtgcaacaaaagaaacgaagtgttggtccccaatgaatgtt

SEQ ID NO: 21173 - DNA, 277 bp, Glycine max
  Clone ID: 700870532H1
acacgtacgtattctcgctcgacggcacagtcaaggagcagacagtgagcaatcttttacaatcactcctagttggagcatcagtgtttgctatgcctgccataaaaaagataccaacttcagttctctggggatattttgcttacatggccattgatgtcttccaggaaatcaattctgggaaaggatcctacttctttttgtaacacctagtaggtggtacaagttgctagaaggggatcatgcttcctttgttgagtcggtaccttacaaatac

SEQ ID NO: 21174 - DNA, 254 bp, Glycine max
  Clone ID: 700870536H1
cttggtatctggggaggcaagggacaaggaaaatctttccaatgtgagcttgtctttgccaagatgggaatcaaccccatcatgatgagtgctggagagttggaaagtggaaatgcaggagagccagcaaaactgtcaggcagagataccgtgaagccgcagacttgatcaagaagggaaagatgtgtgctctcttcatcaacgatcttgatgcaggagctggtcgtcttggtggaacacccaatacactgtca

SEQ ID NO: 21175 - DNA, 253 bp, Glycine max
  Clone ID: 700870538H1
aaagcattgaattcaaaaactaagttcatttcttgtgctttgctttattcctcaaaaccaaacatgtcgaacacatgcggcaactgtgactgcgctgacaagactaactgcaccaagggaaacagctatggtgtatagtagagactgagaagagctacatcgagactgttgacatggatgttccagcagctgagcatgatgggaagtgcaagtgtggcactaactgcacttgcacggactgcacttgtggcca

SEQ ID NO: 21176 - DNA, 248 bp, Glycine max
  Clone ID: 700870539H1
aggttttcggaattggatctcggaattttgaaagcattgaggaaaattgaaagataaagtaatagtttttggaattattattgactaaaaatgaaatatttagccaactactcatgtttcatgtgtgcagaaatgaaatgaatctacatgtgaaaaattagttgttgagtgtttgggtctgacaacttgggagtaacctgtcccatggtttatgatgcatttatccatcagtgttgtactacttgtaa

SEQ ID NO: 21177 - DNA, 251 bp, Glycine max
  Clone ID: 700870540H1
ctgaaacactcacacttcagcaaaactctcctcatttatccctccaaccgaaagattaaacatggttctagttgcaagtcatggcgaggaggaaaaaggggcagaaggcattgctactgttgattttcgaggtaccctgtggacaagacaaaaactggaggatggctagcagcagggctcatcttaggtactgaattggcagaaagaatatgtgtgatgggtataagcatgaacttagtgacctacttggt

SEQ ID NO: 21178 - DNA, 249 bp, Glycine max
  Clone ID: 700870541H1
ctcttgttctgaacgacttttcaagagaatcaaaccatggcagtgaaagtatacggtccccactgtgcttccaccaagcgggtgctggtttgtctggttgagaaggaagtcgaatttgaggttgtccctgttatgtcactaagggggagcagaaggatcctgagtacctcaaactacagccatttggagttgttcctgtcatcaaagatggagattataccttatatgaatctcgtgctataatgaggt

SEQ ID NO: 21179 - DNA, 246 bp, Glycine max
  Clone ID: 700870542H1
cgaagatttagggtttcgcattgctacttcgcgttcgttcatctctctctcacgcctcaagattttcaagaacacattccaatctggatttctttccattttgtacagccttggataggagtaaacctttgagatatgggacaaagaagttgtgaatgcccatgttaaacgaccacaggatgaagacatacaatccaatgtactggaaataattggatcaaatattcagtccacatacattacatg

SEQ ID NO: 21180 - DNA, 248 bp, Glycine max
  Clone ID: 700870544H1
gaaagaaagcgtgttttggctaggagaaagagtagcagaccctttgttcagggcccatgctcaattcccttctgagatgattgaatttagaaaagggccagttctttgtgatgcaagaaaatcaccaattatctcccctcctacttggaaagtctgagtgcagcacagctcaccggcacatgatagccttgtcaaaggcgcaaatcaaggaaaccaatcaaaagtgtctgcaactgccgttgatcatt

SEQ ID NO: 21181 - DNA, 245 bp, Glycine max
  Clone ID: 700870545H1
gtgacattcattgtccaatcagaacgtgacatggggtagtgaatgttccttcgtaacagtcaacgtctaaatctggacttggggatcacatttacgggattgtacataattgaaggactaaattcgtgataaatttaaagagggactaaaatcaaaattggagacaactagagggaccaaaaatgcaattttgccaattatatattatgcttatgtactcctggccccaaaaacatgatgctgaa

SEQ ID NO: 21182 - DNA, 246 bp, Glycine max
  Clone ID: 700870546H1
gtaagctcccaagcagtgggaggaggctcgggactctgaccgcgtgcctgttgaagaatgagccggcgactcataggcagtggcttggttaagggaaaccaccggagccgtagcgaaagcgagtcttcaagggcaattgtcactgcttatggacccgaacctgggtgatctatccatgaccaggatgaagcttgggtgaaactaagtggaggcccgaaccgactgatgttgaagaatcagcggatg

SEQ ID NO: 21183 - DNA, 234 bp, Glycine max
  Clone ID: 700870547H1
ggcctcctccaccggatggtcaacagagaaaggagggggtctgcaattctcgatattttcacctagtgattaactcccatcgaaggtctaatgctctaaatggtgttaatattaatggatcctgagttgatatccatctagagtaaaagaggaagtttgcagctttttccagcagagatttcaagaaactatgagcagcagaccagttttgaatggcacctcttttcacaccat

SEQ ID NO: 21184 - DNA, 255 bp, Glycine max
  Clone ID: 700870549H1
ctcttttctgcatgtttgttctcttaacgactcctccgcgaaagaggattattcaatattttggttgggttgaatcccggggttgaagcgttgcagacatcacggctattctaagagtgtctcgctccctcattatgtccgatctgtacgacggaggacgggtagttgcgtaactgccgttaacccttcgccgcacggtgggcgtggtgctttgccttctgaaggtggtagcccttcagacttgctcttcctcgc

SEQ ID NO: 21185 - DNA, 252 bp, Glycine max
  Clone ID: 700870551H1
cttcctttgaagttttcgtagttctctgcatcatggagatggaacgcgtcttcgagtttcctcacactcacatgcctcggcgcccgagaaagagagcgagattgggctgggacatccctgaggtccccaagatagatacatagcaaaatgggtgaaggaacttttgggcaggtcttagaatgctgggatagagaaaggaaggaaatggttgccgtaaaaattgtccgtggtattaagaagtatcgagaagca

SEQ ID NO: 21186 - DNA, 251 bp, Glycine max
  Clone ID: 700870552H1
gctatgcccacataacaacaccactaaaaatggcacttgtgagccacgtttgtgtgagatgtgtagccacacccacttccccagagtccccaaattcggcacccttgccagacccaaggcaaaccaaggttgccttccgaagaagaagcctcagaaatggtccaccggggtggctcccggggagtacggtggccctcccaccaccaccaaactccgcaaatactggggcggcgatgacgaagaccctttgg

SEQ ID NO: 21187 - DNA, 249 bp, Glycine max
  Clone ID: 700870553H1
ctgaaacactcacacttcagcaaaactctcctcatttatccctccaaccgaaagattaaacatggttctagttgcaagtcatggcgaggaggaaaaaggggcagaaggcattgctactgttgattttcgagtcaccctgtggacaagacaaaaactggaggatggctagcagcagggctcatcttaggtactgaattggcagaaagaatatgtgtgatgggtataagcatgaacttagtgacctacttg

SEQ ID NO: 21188 - DNA, 248 bp, Glycine max
  unsure at all n locations
  Clone ID: 700870554H1
ttttaacgatcggagtaagtggagaggcctgatnagaaaaactttgattgaaacattctatactattggttaaaaagacgggaagagagagagactttttcttgtttgactcacaaggaggaagaagaaatttagaaaataattcacttttgtattcttaaaatttggatttcaaaatataaataggagtatttattcaatacatttgtattttttaaaattatcacacctcccttccaaattttcca

SEQ ID NO: 21189 - DNA, 265 bp, Glycine max
  Clone ID: 700870517H1
actgtttagtgtaactctcaagccatgtctccgggtcccgttcttgacgccggcgccgaccaacaaatccccttcgtcgacgacgcatccctcaagaagaaacctcaccccctggaagatgacgctcctattgtcgaagacgcaaggacgatgacaaagacgaaaccgaagacgaggacgaggacgacgatgacaaggaagatgacgcccaaggtgctgctgagggtgggaagcagagcagaagtgagaagaagagccgaaaagc

SEQ ID NO: 21190 - DNA, 269 bp, Glycine max
  Clone ID: 700870501H1
gcaattgaagttaaaagccttagccttccctacaactccaaacataaagacatcatcatccatggctgcctccgtctccactgtcggagctgtcaacagagctcttttgaacctgaatggttctggagctggagcttcagctcccattcagccttctttgggaccagcttgaagaaggttattgcctcaagggtccccaacagcaaggtttccggtggaagcttcaagattgttgctgtagaagagcagaaagagattgaagagaccca

SEQ ID NO: 21191 - DNA, 263 bp, Glycine max
  Clone ID: 700870504H1
agttcatccagatggtcaagtcacttttatggacactgctattgagatagaagatcttctttctgtagttgctgactcatacttattacgtaagggtgaaaaacaatctatgcttgttccacacttcagcaggattagtataacgaagtagaagtcagaagtctttcctccacattggatattcattctacattgactgttcctttaaagagtcctgagaaagtgaaagtcaagccatcacaaaagaagaacaagaaagtagc

SEQ ID NO: 21192 - DNA, 260 bp, Glycine max
  Clone ID: 700870505H1
gtaaattgggaatggtggtggtagtgccaggtgtctgtctgaggagaaaatagactaagaagctatgaaattttggcacaaggtctgattgtagaattgaagaagatgactggggggggtatcactatgcaatcgacgccggaagctcaggatacttggatttgtatccagagcggaagatgtcctttttcaaaaatccttacattctcggactggctgctgtcgccggcatcggtggtctcctcttcggctacgacact

SEQ ID NO: 21193 - DNA, 259 bp, Glycine max
  Clone ID: 700870506H1
cccaaaagcctcctcctctttctcttgttcaaccttcccacaaacactgcatgtttctttgaccacaactgcttcttcaatttccaatctttttggacaccctctattgctattcctcccttggtgttgtttgtgttaaaggtatctctctacttaatataaagttccattgtctcttgaggcaattttcaaccttagttgtgtgttttggagagtttttttgtgttgttttgttgaggtcgggtttgtgagtgagaga

SEQ ID NO: 21194 - DNA, 266 bp, Glycine max
  Clone ID: 700870508H1
cgggtcgagcttgaactatcgtgtcttcttggctttctctgttcaggatcaagatggatattgtatcacgagctttgctatttccgttggctatacttgtgctcatattaagcacaccttgctcaggtgcttttgggaagagtggaataatgtgaaaacagctatttttctgtcccccaagtttgaacttggaccaggatcggtagccaataaatatgattatgacgctgattttccaagaggtcatatagcacttaagagtgtca

SEQ ID NO: 21195 - DNA, 255 bp, Glycine max
  Clone ID: 700870509H1
acattttgtccctggtggactcaagaagagtctttcataggacagttaattaaaattatagcctgaaataagggttcactagcaatggcctcaacctcttctgctctcactatatcctcttcttccacccttcatgattctaggctccaagacagtcaccagctgcttcaccacaatgtgtgagccttccctctccccttttgcactctcagaactgttcatggaagaccactgcttattgtggcagtattgctc

SEQ ID NO: 21196 - DNA, 257 bp, Glycine max
  Clone ID: 700870510H1
cttggtgtagaatatatggtataaactgtattgtggcatgaatgctgcaggaacttttgcccgatgcaacaattgagagtcctgaagatgctgtaatgaagcaacatatgagaaaagacgtacatgatctcctgaaagcttgaacttaagggaaaggaaaatattaaccctacgctttggccttaatgataaccagcctaggtctcttcaggacatagggacacttttcaaagttagcaaagagaggataaggaaga

SEQ ID NO: 21197 - DNA, 256 bp, Glycine max
  Clone ID: 700870511H1
aaagatctgaaaaaccatgaacttgaaggcaggccggttgcttcattgcataattgaagttgttacttttaccctagtattatttgggtaccaataccaagataatgtattttcttcttaaaaaaaaaaaaaacttatgccaaactgccaaagtcatattctctcgtctctttctctatgggggtatctttggtgttagtagcttaattaggtgcaacaaaagaaacgaagtgttggtccccaatgaatgttaact

SEQ ID NO: 21198 - DNA, 255 bp, Glycine max
  Clone ID: 700870512H1
caaccatgcttctcagaacagcttcatctttctctctcctcaaagccaacgccgaccatatactccctctccccaactcttcttcttctggtattattcgctactctcagtctctggggaaaaacttggttccatgcgtaccaaggacaccaacaaccgccccttaaccggcgtcgtttttgaaccctttgaagaggtcaagaaggagctcgaccttgttcccaccgtcccacaagcttccctcgctcgccagaa

SEQ ID NO: 21199 - DNA, 251 bp, Glycine max
  Clone ID: 700870513H1
gcagacacaagggaaagcttgagacagagagtttgctgcaagcaaggggtgttaattggacttctataaggccagtctatatctatggacccttgaactacaaccctgttgaagagtggttcttccatagattgaaaccggacgcccaattcctatccccagctcaggactacagataacccaacttggtcatgttaaggatttggcgacagttttatccaagttcttggtaatgagaaggccagcaagga

SEQ ID NO: 21200 - DNA, 247 bp, Glycine max
  Clone ID: 700870515H1
caagtgaacaaatcaaatctctctctcaatctagccttctttctgtttttcaatttccaaatcacgaaactcaagaagatggagaaagcgatcaacagacagaagattttgcttcatcatctcaacccttcatcatccaccaccccaacgaatcatcctccctccatgcttcagcatgtgtggcgggggatagcgctgcttatcaaaggacatcgacattcggggacgatgttgtgatcgtggctgc

SEQ ID NO: 21201 - DNA, 334 bp, Glycine max
  Clone ID: 700763886H1
gacaggaaggacttcgactttgtaaaatccagtctctcagcagagggatttgatgttgtttatgacataaatggacgcgaggcagatgaagttgaacccatactggatgctctgcctaatctggagcagtttatttactgctcttctgccggtgtctatctcaaatctgatctattacctcacgcagagactgatgcagttgatcctaagagcagacacaagggaaagcttgagacagagagtttgctacaagcaaggggtgttaattggacatctataagggcagtctacatctatggacccttgaactacaacccctgttgagagtggttct

SEQ ID NO: 21202 - DNA, 336 bp, Glycine max
  Clone ID: 700763887H1
ctcgagccgtttgtcaaattcttctgttcaacaggtctttgccaatggatactaagtcggctgtagaattaatggagtcttccgcagaggttcatttttctggatttcacatggatggttttgagcaaagaaaggctagcatagaacaaccaacaacctcagaaactgacatgtataaacaaccttttgtcataggtgttgctgggggtgcagcatctggcaagacaacagtttgtgatatgattattcagcagcttcatgatcaacgagttgtacttgttaatcaggattctttttacaataacttgacggaggaggaacttacaagagtacaag

SEQ ID NO: 21203 - DNA, 334 bp, Glycine max
  Clone ID: 700763888H1
ccactccaatgcaggatgttcaggttacaattgattggtttatttcctctcaggaatgtgttcccaggacttattgtgttttaaatccacaaaatccttttgtgttgaataggtggatggggaaactgactttcccccagggcacttcccgaactgttaagagaatgcctctttctatagggggaggagctggtgcaaagaatgctattctcatgaatatgccaaatgctgttctttcaatgtggagatattttgttggagatctcgtctttgaagtttctaagatgacttctccctacattaaatgtacagtctctttcttcatagcatttgg

SEQ ID NO: 21204 - DNA, 338 bp, Glycine max
  Clone ID: 700763889H1
ggacgggttcgaagatcagggaagggtatgcctgattggcagcaaattgtgaaggagctaccaccaaaggaagcatttttaagcaagatagaaagatgagaagtattgttgagaattcagacggttcaaattttaattattattttttttcctgtcccaagtgtctcctggtatctccgtcgttggtaatgtcccacagcaatatttttcttggccattaaactaaacactgggcatccattcctccacgatcactacagactttttttttgggtataatgttttacactgagatttaaacctataacttcatgtatatttcaattcccaccactagg

SEQ ID NO: 21205 - DNA, 331 bp, Glycine max
  Clone ID: 700763890H1
aggtgattcaactccagcagagcaatggaatcctttttgaggaattgcaaaaacaaaagatgaaaaatgttcagttggagaaacagttgagcagtatgattaacaaagtggaaaagtgaacaagacatgaatgttgtcatgatttgactgatattgaacaacacccgacagatgttcagatacaacacccgacagatgttcagtggtaatattcaatgatggtttgagacatacttgagggatgggaacggctcattgcgacgtacactaatctttgatatgctattccttgagttacatgtcaaatgtaatttattgagataatgagatc

SEQ ID NO: 21206 - DNA, 336 bp, Glycine max
  Clone ID: 700763891H1
caacaaagtctcgtctcgtctgtcgcaggttcagcatcttcttcagcaggccgaacaccgcgctctctccgccgaccagggctcacctcctaaaatcaccttagatcatgttacggtgagctttgccagaagtggaggacctgggggtcagaatgtcaataaagtgaacaccaaggtggacatgcgcttcaatgttaaaaatgcatattggttgagtgacaggatcagagacaagattttgcaaacggagaaaaaccgtattaacaaggatggggagcttgtgatttcttcaaccaagactagaacgcagaagggtaacattgaggatgctttggc

SEQ ID NO: 21207 - DNA, 318 bp, Glycine max
  Clone ID: 700763893H1
aatttctcaaatatcaagttatgacgagtttgcactatgcagagatggaaaagcaagagagcaagatcatggtggctgtggatgagatccaagagagcatgcatgcactctcctggtgcatcaccaatcttatttccgaaaccaacaagcttgttctgctttatgtcaggccaccttctgctttctactccttggatgccgcagggtataacttttcctccgatgttgttgatgctatggagaagtacagtatgcacttggctaattcagtcatggaaagagctgaagctgtatgcagagacttgaacgctactaata

SEQ ID NO: 21208 - DNA, 331 bp, Glycine max
  Clone ID: 700763894H1
gctcgaggaagacgaagatgtcaggcttcttccaaaccagcttctattttggatacactttgatgttttgtcttggactgggaattctgtgtggagctgtgggttatcttggttcgaatttgtttgtgaggaggatctacagaaacatcaagtgtgactaaggcttttgtaggagtctgagaccagagcacttccatatgtttgttgctggagacaataaatttcttagaggaagcctctggtcatgtgtgggggacaaacaatgtttacaggtagtaagtatcacagggttgaggatgaggatgtattttttctctatattagttgatgt

SEQ ID NO: 21209 - DNA, 330 bp, Glycine max
  unsure at all n locations
  Clone ID: 700763895H1
tggtagtaaccattgtagcttctcattgtgttgttccaaaccaagaaacacccaaggttcgtttatggttatcagatagtgaccaagtagtgcgtttaggtcatacacccactatatatgtttacaaagcaaaacacaacaccaaaaccatagagagaatgaaaacctcacttggcaagattttggtgtactactatccagttgctggaagattgaacttatcagatagtggtcgaatggaattggattgcaacgcaaagggagtgacacttcttgaagctgaaaccacaaagtcattgggtgattatggagatttntcaccttctgagt

SEQ ID NO: 21210 - DNA, 278 bp, Glycine max
  Clone ID: 700763896H1
aaaaaactggtggaagtgatgaaacatataggaaaggtccaacattctttggctggatcagaagctggtggcaattttggaaaggcaatgcaaaatctggtgattcaactgctcatcagaacaaggtggttaatcattttgaggattctaactcatctgaactggtagaccagacagtccagactgttagtgattttgaagataagtcatcagaactggaccagaatgctatttgttctggaaagcctgagttgttttctagcagttccgtttgggat

SEQ ID NO: 21211 - DNA, 335 bp, Glycine max
  Clone ID: 700763885H1
ctttggaatcacagaaagatatctcagacacacacaacgcagtgagaaagaaagatagggagagagagagagagggtttttattttaacgttttttgttgctattcctttacagctcaacctgcatttctctctcacacactcgcatctcagatcgaattcgaggtcactgactgattctgcgctgttgatgtttcatatcaactagatagctacatggtggagagagacatttttctcatatgacttctattaaccatattattattgagcagtgctgctatgggcatttgtcttttgaaatggcaatggccgtggcttctttatgttctgctg

SEQ ID NO: 21212 - DNA, 334 bp, Glycine max
  Clone ID: 700763857H1
ttggcctgatatggcagaagttagattgcttctgtgaggggaaaacaatagccttagatggaaggagggaaggatggtccacatgagttatgatggtggggttgttgggtttgggtacctcttgttaatgtaattggcgatttgtaatgttgttgaccagttccttgtgaaatgtaatgtgctatcctatctgtttttctttaaaccaaaaccgaagaatttggactttgctcaagctgcttctcttcctctagcaattgagactgcttatgagggtttggagaggactggattttctcctggtaaatctattcttgttctggatggttctgga

SEQ ID NO: 21213 - DNA, 340 bp, Glycine max
  Clone ID: 700763858H1
cttcaaaacactcataacacaaagcacaaagcaaagctcatccttgagttaaaaaatggcagcagcttcttccatggctctctcatccccatccttggctggcaaggccgtgaagctgggcccatcagccccagaagtgggaagggtgagcatgaggaagaccgtcaccaagcaggtctcctcaggaagcccatggtacggcccagaccgagtcaagtacttgggcccattctctggcgagcccccgtcctacctaaccggtgagttcccaggcgactacggctgggacactgctgggctttccgcagacccagaaaccttcgccaagaaccgtgaactc

SEQ ID NO: 21214 - DNA, 337 bp, Glycine max
  unsure at all n locations
  Clone ID: 700763860H1
ctctaccaatccactgtcgatggaaggaagatcgtcgacgtacttgttgaccaaaacattgttcccggtatcaaggtcgacaagggtttggtgcccctagctggttcgaacgatgagtcatggtgccaaggtcttgatggtcttgcgtctcgctcagctgcatactaccagcaaggtgcccgtttcgccaaatggcgtactgttgtgagcatccccaacggtccctctgctctggcagtgaaggaagctgcctggggtctagctcgctatgctgcaatttcacaggagaacgggttggtcncaattgtggagctagagatcttgcttgatggtgaga

SEQ ID NO: 21215 - DNA, 224 bp, Glycine max
  Clone ID: 700763861H1
agactatagtagtgtacaaaatgtggaagtcataacaataagatgcatgctctagcaaacagaaggttaaacataaaggaactttgaagactggggggtcaggatcacatactttagttttaaccttctgtttgctagagcatgcttcttattgttatgacttccacattttgtatagactatagtagtgtacatagcttgttttgtaaattgcaacgtttggt

SEQ ID NO: 21216 - DNA, 341 bp, Glycine max
  Clone ID: 700763863H1
gaaaaactcagcacaacacccctcccaaccctcttcttctcttaatttctcatcatatcatatctattaatcttacacatatattaagacatagatataatttttttcgttttatttttccttgcatgggctgttaagataagatgtctcgcacgtgctcacagtgcggcaacaacggccacaactcgcggacatgcaccgacggtggcgccgccgcttcctgcggcgggtctcccagggagaacggcatcatgctgttcggcgtaagagttatgaccgaagctaactcctccttccggaagagcgccacatgaacaacctctcacagtacgagcggatcc

SEQ ID NO: 21217 - DNA, 236 bp, Glycine max
  unsure at all n locations
  Clone ID: 700763864H1
attcatacgttgtacgcttcttccttccgtttgtgtttcccaaattcatcaccacaatttaagcctctgaatgccattcctctcggaggaacaaaactctacaacaacaacaacgttaaatttcccagagaaagaacaaggaccagagcaacccttgatgatgttgaaacagaccaactttcctcaaccccacttgttgagaatgacaagccanaaaggatgtagatgatagtgtg

SEQ ID NO: 21218 - DNA, 341 bp, Glycine max
  Clone ID: 700763865H1
gcaagatataaatgtgaatgccaattctacccataaagcagtgccctctatgggcgttaagacaactgagaatgatgatgatgatgtgcctcccggatttgggccaccagcggcccgagtggaggatgacctgccagagtttaatttttccggcagttcaaatccgtcacatttgggccaaaaatcaatgggaccaccaaatatggtcccattacactcggctaacccagccccaccacgccctgcagaacaaatgagggaacttgtgcacaaatatgggcaaaacaaaccaaatgtaccttcggtaaactggcaggataaatgtaggggacaatcaaccc

SEQ ID NO: 21219 - DNA, 322 bp, Glycine max
  unsure at all n locations
  Clone ID: 700763866H1
gttgggattctcatgaatcccataaattatctggaattacttctggaaattgtcagtatggtggctcaaatcagaacctggagaatatgatcggtacagtcatttgtcagtatggacaagttacaccaaaattatcaaacagtcaatgtggactcttacctgtttctggggttatctccaaccttaagtctgagggacatggtaatgttttcacttctttgttctatgcacaatctggtattcaccctatgtcgagtccanaacctgtctgccagaatgagattctccctttcccacaagtactccacccagtcctatcctg

SEQ ID NO: 21220 - DNA, 335 bp, Glycine max
  unsure at all n locations
  Clone ID: 700763867H1
ctgctgcttcccttggcatgtcagaaatgcttggaaaccccatcaacttcagtggtgccacaaggccagctccatctgcttctagtcctgcctccttcaagactgtggctcttttctccaaaaagaaggctacaccaacatctccaaaaaaagctgctgctgctgctcctgccaatgatgagcttgccaagtggtatggtcctgacagaaggatcttcttgcctgagggtctcttggaccgatccgaaatcccagagtacttgaccggagaagtccctggagagtatgtggattctcctctcttatagtccacttntaattcacattaacatgct

SEQ ID NO: 21221 - DNA, 337 bp, Glycine max
  Clone ID: 700763871H1
ttgacaggttcatcatcataaccttcaatgaaaagaaatggctgaggcaagcattggcagcaaaagcagcagatggtctttacagggaatgacagctctcgtcaccggtggatccaaaggaatcggatatgctatcgtggaggagttggcacagcttggagccactgtgcacacttgcgctcggaacgaagctgaactcaatgaatccttaaatgaatggaacacaaaaggatacagagtaactggttccgtctgtgacgtggcgtctcgtgcagacagacaagacctcatagctagagtctccaatgagtttaatgggcaactcgatatccttgta

SEQ ID NO: 21222 - DNA, 308 bp, Glycine max
  unsure at all n locations
  Clone ID: 700763873H1
cacaatcatgtcagatagagaagtagtagtacatgggttatctgaggaccaagcatggcaagagctcaagtttccagagttgttgaacagtgatgctgttagagaaatccatgcaactattgaaaaagaatgggattttcttcaaaggtcagcttgccataccgctgcgggaagggctctgtggaagcatgccatccatgatccactggctgacgtgctggcaggagagacttacttgagaaacctccatgagttgctcangtatgacattctcaacaatgctcgggaaacttccggagtcactctcg

SEQ ID NO: 21223 - DNA, 333 bp, Glycine max
  Clone ID: 700763874H1
ctcgcagcgccgagtctgtgcgagcgactatcatagagcttgaggacaatctacaggacggcattgccaatgcagttggctcttctctgacaaagctttcacatgcaacagttgtaggcattgcttgtgatgtttgtgaacctcatgatgtgcagagactggctaacttcgctgtcaaagaacttggtcatattgacatttggataaacaatgccggaacaaataaaggttttagaccattgcttcagtttagtgacgacgatatcacacagattgtctcaacaaatttggttggatctatcctctgcactcgagaagccatgcgtgttatga

SEQ ID NO: 21224 - DNA, 331 bp, Glycine max
  Clone ID: 700763876H1
gtaagaattatggcatcagaggagacaacaatttggaaggcaatgataaaaactccagcctccatagtgttgataatttacacctttatatcaatgtggtttgtaggtggcctcactgccttccatttgtatttgataagtaccaatcagactacatatgaaaacttcagataccgatatgatcggcgagccaacccatataatgaaggagtgttgaataatttcaaagagatattctgcatcagcattcccctttcaaagaacaattttagggcaatggtgccaagagaaccagcattacctactcgatcagtgggtggaggctttatga

SEQ ID NO: 21225 - DNA, 328 bp, Glycine max
  Clone ID: 700763877H1
ctgacccaatctggatacctaccgtgacctccttcaaactgtccaagtcactaagcccacttcctttgctgaacaggatttattgaacatgtacttcaaggacaaatataggccaattcctaatgtctataatcttgtgttggccatgctgtggcgtcaccctgagaacgttgagcttgaaaaagttaaagtggttcactactgtgctgctggatctaagccttggaggtacacagggaaggaggaaaatatggagagagaagatatcaagatgttggtgaagaagtggtgggatatatatgaggatgagactttggactacaacaat

SEQ ID NO: 21226 - DNA, 265 bp, Glycine max
  Clone ID: 700763879H1
gtgtttttcatttcatcgtgcattcaatggccaccacagcagctctatccggaaccatggtgagcacctccttcatgaggaggcaacctatgaccaccacaagcctaaagacattccccaacgttggtgaagctctttttggtctgaaaagtggacgaggtggtcgtgtcacttgcatggcctcgtacaaggtgaagctcataaccccagaaggagaagtggagtttgattgcccagatgatgttttcattgttgacaaggcaga

SEQ ID NO: 21227 - DNA, 327 bp, Glycine max
  Clone ID: 700763880H1
ccaagttcttccatattggttgaggaggcctcgagtcaatatttagtttttgctgccatctgtgggtttctgatggatgatgccgggcatcgtgaaaatggaaggcacaaagcagcagatcaatataaatctgctcagggacagtggttgatgcaacatcagccttccatgaagcagattatggcaattatggctgaaagagatgtagccattcaagaaagaaatctggccatttccgagaaaaaagcagcatatgctgagcgcgatatggcattcatgcagcgagatgctgcaattagctgacgtaataatgcacatttggaacga

SEQ ID NO: 21228 - DNA, 337 bp, Glycine max
  Clone ID: 700763881H1
gtgcctcggaagcagttcatagactacttgggaaactacgttaaccactttgagatcaagcctctgtaccagcgtgcagtggagttggtggagtatgatggatggaaagggatttggagagtgaaggctcagaatagaagatctggtgagcttgaggaatacgctggaaagtacctggtcgtggccagtggcgaaaccgccgagcctcgtctgcctcagattcaaggcttggagagtttcaatggaaaagtgattcactcaactgcctacagaaacgggaacgagtttaagaataaacatgttctggttgtcggatctggcaattccggcatggaga

SEQ ID NO: 21229 - DNA, 337 bp, Glycine max
  unsure at all n locations
  Clone ID: 700763882H1
attttattggtcagaaatgagttagtatggttaagtatttcacactggatcatctatttctaatattataagctaaaggaccaagaactgaaattattataacctcaacttgaactatccatacatagccactttacactcactcttgtgttgttgccttcatggccaagccagtgtccattgaggtatggaacccaagtggcaaatacagagttgttagcaccaaaccaatgcctggaactcgttggatcaatcttctcgttcanaatgatgttcgccttgaaatatgtaccgagaaganaacgattctgtcagttgaagacatcattgctttgat

SEQ ID NO: 21230 - DNA, 331 bp, Glycine max
  Clone ID: 700763884H1
atcgggcacaagctggttggctcatgctcaacagggcctagcagctttggctatctccttggcactcaactttagcccagttttgtttaatggcaatgcattggcatctgagtttgatgtgcttaatgagggtccacccaaagattcttatgtgtttgatgatgcaggagtgcttagtagggtgaccaggtctgatttaaagcagttgttgtctgatttggaatcaaggaagaacttccgcatcaattttataactgttagaaaactcacgagcaaagctgatgcatttgagtatgctgaccaagtcttggagcgttggtaccttctgtag

SEQ ID NO: 21231 - DNA, 318 bp, Glycine max
  unsure at all n locations
  Clone ID: 700763856H1
cttgttcaagcggtatggcaacgagatggacattttgcttaagcatggagagaatatcttccggagtctgagatgggatctanacgacctggacccgcacgacgtttcgtgcagcaattggggactgtacgctttccgagggaagcgttacgaggcaacgaagaaagagaccgaagaagaggtgcacagcgaccgcaccgcgtaggtcacatgtgcaaacaagatgtaaatatggtcgtgtacattactgtagcaaactacgccaaggaatctggattgcgcttctgacgaagcaatcgtcactacctgctanaaaaa

SEQ ID NO: 21232 - DNA, 341 bp, Glycine max
  Clone ID: 700763837H1
caggggttttaagacatgccctagaaaacaaagatattttgggagatggttatgaaggtgatgttcttggggaatcaacaccagatgttatagtcagtgaatttttgaagggtgagaaggagcttattgagaagttgttacaaactgaaataaatatattccgctcaatcagagatggaagtgctctgatgcagcatatggaggatttctattacatcacgttactagagaatgtaaggtcaaattaccaccaagctgtgtcaaggtcagaacaagatcaaaactatagactataatgatccaacaagggtttgttcttacgaggctggccagcaagtctt

SEQ ID NO: 21233 - DNA, 342 bp, Glycine max
  Clone ID: 700763838H1
tctcaatcgttttctacataatacaaacctctctaatttttgaagcttattatacccaatctcgatatgcagatcttcgtgaaaaccctaactggcaagacgatcaccttggaggtggagtcctctgacaccatcgacaacgtgaaggccaaaatccaagacaaggagggcattcctccggatcaacagcgtttaatcttcgccggaaaacagctcgaagacggcagaaccctcgccgactacaacatccaaaaggagtccacgctccacctcgtcctccgcctccgcggcggcatgcaaatcttcgtcaaaacccttactggcaaaacaatcacgctagag

SEQ ID NO: 21234 - DNA, 333 bp, Glycine max
  Clone ID: 700763839H1
cgcagcattcccatttcccactcgcccaaaacctcagcaaccaaacaaacgccgccgccgtcgccatggccgcgatcgcgcgactgaggactgccgctctcgggctccggcccaaccgcgggttcggatcggcggctgcggtccagtgctactacgacgacgacgactacgacgacgaggaggagatggaagaggagcgcgcgccacgtggcgcactggacgcgcagggttgcgcgccggagaacggagtgcagtgggtgatgataggggagcccggcgccaagaggcaccagttcgctcagagactctcgaagcttctagaagtcgcgcaca

SEQ ID NO: 21235 - DNA, 327 bp, Glycine max
  Clone ID: 700763840H1
aaagtatcttctatttggtgttgctagaagatttgctaatataggtaaaagatagttaaaaatagaggtggaaacagcattgtcttggatgccattcttttggacgatccacattacccttgtagtcacgttattattacctgaaaatttagaggctctattgtggaccaaataagttataattcaacaataaaccaagggaaatgagaaaaccccgggttgctggaggtagtagatgacgattttttttcttggaccatagtagttgttggtcaagactatggaatttcaagctgtgcatggttgtataaactaagtagcaattaa

SEQ ID NO: 21236 - DNA, 98 bp, Glycine max
  Clone ID: 700763841H1
ggatatgttaattaatacagatagactagatccaaatgtacatacataaataaatattggttgtcgtctaagaaggaaagagaggaggcaaagggggg

SEQ ID NO: 21237 - DNA, 341 bp, Glycine max
  Clone ID: 700763842H1
ggcgatcgttcgggaagaaacagtaatgctactgacatgggaaagaaggggagttggttttctgcaatcaaaagagttttcacacaccactccaaagggaaggattcagataataacaaaggcacaaaagagaagaagaaaagtctaggaaaactaaagcatggagaggccaattcattcatccccctcttcagagagccaagtagcattgagaaaatctttggggactttgaaagggagcaacaactactggggttaaggcctgccactcctccggagaggcctaaaacgccaccttatgcccctccaagagctccttctcctaggcctccctctccaag

SEQ ID NO: 21238 - DNA, 334 bp, Glycine max
  Clone ID: 700763843H1
cgaaatattcagtgcctgcttggcaagaaagccagcaatactatgttccacccatggtccatgacaatatcccttcatcctataatttccaaggtcctcctacaagatctgatggtgatgcctctacatcagctagctgcaagcgtgattgctctatttttgaagatgataagcctgtcttcatgtctagggacgaaattgatagacactctccatcaagaaaagatggtattgatgtacatcatgagacacacttgcggtactcctattgtgccttccttcagaatcttggaatgcgtcttgagctgcctcaaaacatcattgggacagctat

SEQ ID NO: 21239 - DNA, 338 bp, Glycine max
  Clone ID: 700763844H1
ttgcaattgaagttgaagtcttgcccttctctcttcaactccaaacacaagacatcatcatccatggctgcctccgtctccactgtcggagctgtcaacagagctcttttgaacctgaatgggtctggacctggggtttcagctcccagttcatccttctttgggagcagcttgaagaaggttattggctcaagggtccccaacacaaagatttcctctggaagcttcaagattgttgctgtagaagagaagaaagagattgaagagacccagcagaccgacaaggacagatggaagggtcttgcctatgatatctcagacgaccaacaggacatcac

SEQ ID NO: 21240 - DNA, 337 bp, Glycine max
  unsure at all n locations
  Clone ID: 700763845H1
tccaaatggatgtggcaagagtactttactgaaattgattatgggtttggaaaagccaactgggggtgaagttttgctcggggagcataatgtgttacctaactattttgagcagaatcaggctgaggcacttgatctggaaaaaaccgtgcttgagacagtagaggaagctgcagaggactggaggattgatgatattaaagggctccttgggcgttgtaattttaaagctgatatgcttgaccgaaaagtttcactattgagtggcggtgagaaggcacggctggctttttgcanattcatggtaaaaccatcaatctgcttgtgttggatgaac

SEQ ID NO: 21241 - DNA, 333 bp, Glycine max
  Clone ID: 700763846H1
accaaacagataatgaagtagcccaagggacccaacctgcaattggatctggaggccagtataaatattatttcaatattggaagtgttgagtcttttgaggagaagctagaggaagcgcaagaagctctgggcatttactctcatgattttgtgcctgtcacatattcttctgaagtggtttggtaccaggaattgatgaggtttgctccaacactgttgcttttgggatctctcttgtatatgggaaggagaatgcaaggtggaattggtgttggtggcagtggtggcggcaagggtgcccgtggaatattcaacataggaaaagcaccag

SEQ ID NO: 21242 - DNA, 327 bp, Glycine max
  unsure at all n locations
  Clone ID: 700763847H1
atttgttctttgttccgacaatgcgtccaccgcggaagagggtggatttctcgcgcggcgacaaggtggagatctgcagcaacgaggagggcttcctcggctcctactacccggccacggtcgtgtcgcgcctcgacaacggcctctacgtcgtacgctacgacacgctcctcgangacgacgctcgtttcagccccttcaccgaaacctaattccgaaagaactccgtccccatccggcacgtgtccccaggacccacttcgcgctccaccagtgcgtcgacgccttcgacaacgacggctggtggctcggccagatcaccggcaa

SEQ ID NO: 21243 - DNA, 302 bp, Glycine max
  Clone ID: 700763848H1
gtggagcttggatagattgcattatgaacgtgatccttgtgtacaatttgatggggaaaggaaactgtgggtttacttgcatagagaaagagaagaagaagattttgaggatgatggcacttcatccacaaagaaatggaagaggcagaaaaaggatgctgcagatcaatctgatcaaggaacagtaactgttgcttgtcctggaactggggagcaaagcggatatgatttgtgctcagatctcatggtggatcacaaccagccttgatgatgataagggaatgcacctttgtctactgata

SEQ ID NO: 21244 - DNA, 310 bp, Glycine max
  Clone ID: 700763849H1
cagcgcagagagaaacagacacacatggataaaccacaccccaccaaccgtttccctctccattcatttcctggccacaacaagagaaacaacaaacacagcaatatagcatcgcataaacgttctcacttctcacttttttttttccctcttctccgttttcatgaatatggagcgctacacgctaccggcaccacccaatattattcccgaggaagaagaaaacattgccattgccatgggtgcccctcttatcccttcctttaaatccatgcttcaacaacaccctcaacaacttgactcttacttt

SEQ ID NO: 21245 - DNA, 340 bp, Glycine max
  Clone ID: 700763850H1
gagaccttttcatcaatcagatgaatcttctggatagagcagtgaagatcgttgctgaattagatgaaccagcagagcaaaactatgtaaaaaagcatgcatcagaacaagctcaagcccttggagttgaagttcgagaggcagcaacaaggatcttctccaatgcttctggctcctactcctcaaacataaacttggctgtggagaattcttcatggaatgatgagaagcagctccaagacatgtatcttagcagaaagtcttttgcttttgattctgatgctcctggtgctggcatgactgatgaaagaaaagtcttcgagatggctctgagcacagc

SEQ ID NO: 21246 - DNA, 335 bp, Glycine max
  Clone ID: 700763851H1
cgtgtcttcttctctaaaataaaaaaccctaacttctgaacctttcaccgcatcgccaccgattccctatctccactaatcacagataagaaaatgagtagacgctcgagcagaactgtctacgttgggaatctacccggtgatatccgtgaaagagaagttgaagatttgtttctgaagtacggacacataacacacatcgacctaaaggttcccccaagaccacctggttatgcatttgtagagtttgaagatgctcaagatgctgaggatgcaattcgtggtcgtgatggctatgattttgatggccaccggttacgggtggagcctgccat

SEQ ID NO: 21247 - DNA, 309 bp, Glycine max
  Clone ID: 700763852H1
gaagagaggaattttgagtttgataatggcaaatggtaacacgcagcagcctggtagctattgaacagtgtttgtctgctgttcgatttcgaccactcaaaccctaacgtttccaacttgcaaggtgttcgctccagaagggttacgatggattttgacgagtatgagtatttagagaaagcagttgaaaacgctgaagttaatcacagggctaatggtggggacaacaatgtggaatccgaagagagatggcgtaatgggaattcaaagcataaggatgatgatgatgatgatgttgttgatctccat

SEQ ID NO: 21248 - DNA, 333 bp, Glycine max
  unsure at all n locations
  Clone ID: 700763853H1
ctggctcatcttattaattacagatacccacgtctttattacagtttaaatcttctagcttctgataacccgattattgcatgcatcttgaagattctgcagtaagagtaagcacgctttcagttggagaaaaatactactataacggcgtagaacaatttgtatccaactgaaagcgtgcttactcttactgcagaatcttcaagatgcattgaataatcacgctatcagttggatacaaattgttctacgccgttatagtagtatatctctcttattntttcttggggacctcgaatatttatcgagagaactcttgtagatgcagtctca

SEQ ID NO: 21249 - DNA, 337 bp, Glycine max
  unsure at all n locations
  Clone ID: 700763854H1
tactcgagccgagccgaatcggctcgaggaaagatattgtcgataaatagaagtacatctttagcttagtccaagcaggatctgaagtatctgccttattgggtcgaatgccttctgctgtgggttatcaacccactcttagtactgaaatgggttctttacaagaaagaatcacttctaccaaagaggggtccataacttctattcaagcagtttatgtacccgcagacgatttaaccgatcctgcgcctgctacgacatttgcacatttagatgctactactgtactatcaagaggattagcggccanaggtatctatccagcagtagtccttta

SEQ ID NO: 21250 - DNA, 337 bp, Glycine max
  Clone ID: 700763855H1
ctccaagtgatttctatgggaggttctctgatagagatagaagtagccgaagagggtcttctacttctaggggaggttttagttctaggggaggttcttcttctagggaccggagaggttttaaatcctcacggggatgggatggggaagactctgatgatgatgactttggtgatcgatctagttggagaggtggtagaaattttaaaactggcaacagctggtctcgagcagcaggtagaagcagtggggatgattggctaattggaggtagtagacgatcaagcaggccttcatcatcagacagatttggaggggcctgttttaattgcggaga

SEQ ID NO: 21251 - DNA, 320 bp, Glycine max
  Clone ID: 700763836H1
cctctatgttgtccaggcctgtagagaaggtccataatttattggagaacaacatgaacaacataagccatctggatcagttaagtgatgaagaaaggagcaagttaagggatttaagtaaacatacactggactcatggattgagatgacatcgggtacaaagaagatcatggagaagtattctgtgaatacttgcggctattgtcctgaggtccaggttggtcgcaaagaacataagttgagaatgtgcaaggcttcaaatcatcagtctcgaaatggtttacatgcatgataagaggcaacattaaatgatcttgtc

SEQ ID NO: 21252 - DNA, 338 bp, Glycine max
  unsure at all n locations
  Clone ID: 700763811H1
ttggagtgtccctctctaacaaggcgtttgacctaattgatagggctctatcttgagtcttatcagaagaattcaaacccatgacctctccttccctccttcccttcaacaattaagtcaaccttacaactcttaactgagaaattcttatcaatttcctttctgcatccagttctttttgtggtatatggaagagagtttcaaggtggaaaccttggtttcactctaacaaccttttgctctgcttcatttgtgctcaggaaatcttttcttaagaaagatgatatttctaaacaggactgactatttagaggtccgatttntttgttatattaaca

SEQ ID NO: 21253 - DNA, 334 bp, Glycine max
  Clone ID: 700763812H1
gcaaaacctaaacctgaccgcagaagccatgtctgattccgacgagaggatgaaggaaaccctagccctgtcctcagaagcagagcgtgacagagacaaatccatgtctgattctgattctgaggacgaagctcagcagaacctccaaatcgaatctctacagaccgagcttgttactaacccctctaactacgatgctcatttgcaatatatacggcttctgaggagaatgggtgatgttgataaactgtcaagagccagggaagctatgagtgaactctttccgttgagccctacaatgtggcgtcaatggatcaaagatgagctttctctc

SEQ ID NO: 21254 - DNA, 338 bp, Glycine max
  unsure at all n locations
  Clone ID: 700763813H1
ggaattagcacaattcgcagaattagaagcttttgcccaattcgcttctgatctcgataaagctactcaaaatcaattagcaagaggtcaacgattgcgcgagttgcttaaacaatcccaatcagctcctcttaccgtggaagaacagataataactatttatactggaacgaatggttatcttgattcattagaaattggacaggtaaggaaatttcttgttgagttacgtgcttacttaaacacgaataaacctcaattcacagaaatcatatcttctaccaagacattcactggggaagcagaagtccttttgaaggcagctatnntcagacaga

SEQ ID NO: 21255 - DNA, 333 bp, Glycine max
  Clone ID: 700763814H1
attatatttgcagtggagaaggaaagaatatctatctctcattctctcgtgcctcaacgcttttttaactcctttcgcttttccattccaacctctttcacacttcagatctgtttcttcatcggttgttcaagtaaatggcctttgtcaccactgctgaagtgtgtgatgcgaacccatagttaattttgagtggggagcttcgtgcccttcagccagtttttcagatttatggccgtcgacaggttttctctggacctatagttaccttgaaggtgtttgaagacaatgttttggttcgtgagtccttgaagagaaggcaatgcagagtct

SEQ ID NO: 21256 - DNA, 329 bp, Glycine max
  Clone ID: 700763815H1
tgtcacagtaccgatggctataacagctggagctgctggtgtgggtgtaggctctgcagttaatagacttaatgatgtggttgctatgattgctgaggtcagaagcattgctaattcattgcagacaccatttcagatatccactgcacatgaagtggaaactcaaagacagtaggttatgttgcaagaaacagatgaaggaggtgtaggtagtgaattaaacatgcaaagaatattaagaactgatccaaatatttgtgttcctgtgtggatgctaaattaaaagaaatagtgacctatttggaattttgcttcgttaatgggtggag

SEQ ID NO: 21257 - DNA, 348 bp, Glycine max
  unsure at all n locations
  Clone ID: 700763816H1
gtcgtgactggtgctcactttgaagttggagatactggccttaagaaagttctattcctaagacttcatttctgtaaagttgttggtgcncccgtgtgaaagtacccgaatgggagggttctcctggcttgacccagaaatctggaataatctcaacattgatcagcactaccttctcaggtccacaaaagccaccaccaccacggccatctgatgtaaacatcaactctgctttataccctggggggcctcctgtgcctactcagtcacccaaacttctaaggtttgttgacacaactgaaatgacaagaggacctcaagattctcctggctactggggtgtgtctg

SEQ ID NO: 21258 - DNA, 336 bp, Glycine max
  Clone ID: 700763817H1
ttggtttctataaagatgcatcatccttttcattttaaaaaaaactacggtgaagtttaaacttcaccatatctctactaggaagcaacctatgctgtaacagttggtttggcagcactggagagtttggatctccgcttcgccaagctctcactccggcgatctctctgctccttcaatctggaagcgaggagtttttgatactctgctgcttctgattttgccttagcaattctcttcttcttgtcggcaatccttgctcgtttcctttggagtgtcaaaggagtgactagtcgttgaatctttggagctttgctcactttattcccagctttg

SEQ ID NO: 21259 - DNA, 341 bp, Glycine max
  unsure at all n locations
  Clone ID: 700763819H1
gaggaaagtccagtatgtcagcgtcgatcgcttcgactactggttctgggtcggacaacaagtctaggacttcatcctcctttatagagtttggagagtataacagtacccaggcggctctctttggtgatgctgctccctcacacagtagcggccacaggaagggtatggtcatcccacactcgcctatcgctagtctcgagcagtggctcggtagacagtcggacatcaccgctgtcgaaagcatggtcttctagattctcgcctcaattgtcgggcaggcaggcgattctaaacgaatgacgtctcctaggaaagaaggacggcgctganaagaagac

SEQ ID NO: 21260 - DNA, 345 bp, Glycine max
  Clone ID: 700763820H1
cggtcgagcccatcgtttcgcattggttctggtcctcagacggttggaacagcttgactcgtagccacggataatgtttattcgggtctggagtcatcgacttcgcgggctcaggcgttgttcacatggtacgcgggatagcgggcctgtggggggctttaattgaaggcccgagaatcggccggttcgaccgttcgggccggtcggttgctttacgtggccacagcgcgtctttagttgtgcttggtacgtttttgttatggttcggctggtacggcttcaaccctggttcgtttgtgacaatagacaaggggtatgaaagtggagggtattatggtcaatgga

SEQ ID NO: 21261 - DNA, 341 bp, Glycine max
  Clone ID: 700763821H1
agctttcgccagtcagagatctgactgcaaattcagcctcatcaaattcaatcagaagtgctgggaagatgttttcttcaccttctaaatgtcacgatgacttccctttttcctctgtttcacagcatgataggcaatatcaagatcccccctttgtttctcagacaattggtgatagcgtgtcttccgaaatacattcaatgacattcatttctcaccctcaagaaaatgaagatctttcctggggaccagatccatgtcaggatattcttggctttcctgaaaatgtttctgtccagcatgatcaggtggaaaacaatggttgttacataaatgatgat

SEQ ID NO: 21262 - DNA, 339 bp, Glycine max
  Clone ID: 700763822H1
tataattgttgctagttattcactgataattactataattaacgtaaaacatgttgcactgcgccaacacgtcggggaatctggctgtggctggggacatgacagtgttggaaagacagagggcgaggatgaagtggcaagaagagcaagggtacttttctggcaacagcttcaacggtgttttttcttcttcttctctgcacgttcatgattccattatggtggctgctgactccggttgtgcactcgctgaggtcgtggctcaggcccaggctcgctcaaccaattcttcttcaatttcaaggacttgtagttgtccacctgctctggtggagccga

SEQ ID NO: 21263 - DNA, 324 bp, Glycine max
  Clone ID: 700763823H1
cgaaaccagagattcgtaattgcacattctcttttgttgtctccagctcatagaatattataaactcagattcattcagaatttcagattcacctttttcttttcttctctaccttctttttcctctgacagctttttgcagaaagttgtgatttttccttgaaagatggcatctttgatcatgctccagatcagaactgggaattgtgcatctgggtttggtttgaattgtgctgggaaggttaaggttggtcccagcatagttgggtttaaggtatttgcttcagagactcaggctacagagcctgatcttagtgtaactgt

SEQ ID NO: 21264 - DNA, 334 bp, Glycine max
  unsure at all n locations
  Clone ID: 700763825H1
atactcctagacaagtttccagttgaatccagtaaggagaatgaagatctttctgtcaaagcgaagtcaaggtttagcatatccttgcgaagtttatcacaacctatgtcccttggggagatagcaaggacttgggatgtttgtgctcgcattgttatttctgagcatgcacaacagagcggtggtgggagtttcagctctaagtatgggacttgggagaattgcttgaccacatgatgatccttgccgttccatgcaaacatcttttttcctcttaaatttgccanaacttgtgtcaatcattggatacggatttttgggtgcagtgaaagcg

SEQ ID NO: 21265 - DNA, 343 bp, Glycine max
  Clone ID: 700763828H1
cgacacaatgctttttgcaccaccacgccctcaccactccagctagagcttcaacacagcgcctagttgtgagcaccaaaccagaccacattgtttgcaaggcagcacagaagcaggttactgtccaagagggtgaggacactactactggccttgtctctcgcaggttggccctcactgtgctcattggtgctgctgctgttggctctaaggtggcacctgctgatgcagcctatggagaagctgccaatgtgtttggaaaaccaaagacaaacacagacttcctttcatacaatgggaatggattcaaactctcaattccctcatagtggaaccaagcaaa

SEQ ID NO: 21266 - DNA, 285 bp, Glycine max
  Clone ID: 700763829H1
gttggcaaaattgtggaaggtaacgtggaccagtcagatggtagcttccttgatgatgagcaaatagatagtggctgggttctcacctgtgttgctcaacctaggtcagacgttgtcattgagacacacaaggagggagagatcgaatgatcaatatatatatatatgatgtaatcttatccattgctgttctaattctatctatatcttggattttttattttgttatagtgatttggcatatttgtgacaaatagtgagtttattacttgtgtcatatgtgtg

SEQ ID NO: 21267 - DNA, 347 bp, Glycine max
  Clone ID: 700763830H1
ttctcttcctcccaaacatgtttctctttctctctctctctcttaattcctgaaaagcaagtagctaaggaaaacaaaaacatcatcacagagactcacaaaggaaaaacaaacaaacaaacaaaatgtcttctccaagcaagcggcgagaaatggacttgatgaaactgatgatgagtgactacaaggtggagatgattaatgatggaatgcaagagttttatgtgcacttccatggacccaatgagagtccttatcatggaggtgtatggacagtaagagttgagctgccagatgcttatccttataaatctccttccataggctttatcaataagatctatcac

SEQ ID NO: 21268 - DNA, 290 bp, Glycine max
  unsure at all n locations
  Clone ID: 700763832H1
gaagagaagaaagagattgaagagacccagcagaccgacaaggacagatggaagggtcttgcctatgatatctcagacgaccaacaagacatcacaagaggaaagggtttggttgactcccttttccaagctccacaggatgctggaactcactatgcagtcatgagctcctacgagtacctcagcactggacttcgccagtacttggacaacaaaatggatgganctacattgctccacttttatggacaagcttgttgttcaatctccaagaattcatgacctgccaa

SEQ ID NO: 21269 - DNA, 300 bp, Glycine max
  Clone ID: 700763833H1
agcctttcttccacatgttgagtttcatcatcgtcctctcttgagtccccatatcaaatacccaccgaattcaaccccccatataacaaatctcctcccatcccatttttcagcaccaaagtttgaaacttttctcaattgggttgaggagagtttgactcaaatttttatttttctaacgaagcagtagctattagaagtgcagaaattaaatgtccaacatcttcttgttgatgtttgagattcatgtatccgattctcagtgacatcttcttttccgggtgtatgatcaattccact

SEQ ID NO: 21270 - DNA, 329 bp, Glycine max
  Clone ID: 700763834H1
caaatggctgaggcttcagcacaagcttgtgtcagtattccttccaatccctggagttctctgcaaaggggtttcagtgcataataactccctgtaatgtgcactagtaaagaccaaagtatgattattgttacattatgttacatggttgtacttgtatatacatatcttgtcccacctttgtaaatacaattgggacactactaggattgggaagaagggtctttacatttatagtttggcaaatagatattgcaactacctttgtataattctatgtctgaaggagcaattacaatttacaagggatggtgccatttacggcataa

SEQ ID NO: 21271 - DNA, 337 bp, Glycine max
  Clone ID: 700763810H1
ctttggtgggtgatatacctcaaggcctaccaaagaaattgatgcatggatgaaatatttttggtgggtgatatacctcaaggcctaccaaaattacctgttccaaaatcttttgagtatgcacagtccttaattccaactgctcttctcataactggtgtggctatactggaatcagtgggaattgccaaggcattagcagcgaaaaatggatacgagttggattcaaatcaagagttgttcggtcttggtgtttccaatgttcttggttcattgttttcagcataccccacaacaggatccttttcaaggtcagctgtaaatcatgaaagcggtg

SEQ ID NO: 21272 - DNA, 307 bp, Glycine max
  Clone ID: 700763785H1
ggcttatggtggatacctaggcacccagagacgaggaagggcgtagtaagcgacgaaatgcttcggggagttgaaaataagcgtagatccggggattcccgatataggtcaacctttcgaactgctgctgaatccacgggcaggcaagagacaacctggtgaactgaaacatcctagtagccagaggaaaagaaagcaaaagcgattcccgtagtagcggcgagcgaaatgggagcagcctaaaccgtgaaaacggggttgtgggagagctatacaagtgtcgtgctgctaggcgaacagcagagaa

SEQ ID NO: 21273 - DNA, 310 bp, Glycine max
  Clone ID: 700763786H1
cagttcaggtcttgcgaatgatggctcacttttttcaataggagacccaatgccttcagataaagatgcccatgaaatttctgatactccgttatctgttgaatttgctggtgacattcctgaccagacttttgttcctggtagcctatttctaaggaagtcacgttctttacccaatatcagagcttctatactttcttctgaaagagatgcttttaaacatgcattgtcaagatcttccgatgatcttcacgctttacgcatgtggcagaaagaggaattcatcaatgagtttgatgatcaaataagg

SEQ ID NO: 21274 - DNA, 308 bp, Glycine max
  Clone ID: 700763787H1
cacgaaaatggggtgggtttggaaggatgacaacagcgacgatgttcgacgcgataactcttcggaacgatgcgccaccaccaaggtcgtcaaatctcagtgcagaacagaggaggtcgaaactggaaagttcgtcagaaagtgcgagaaaaccgaagagattctcaggaattgcatcggaaagcccgccgaagtgttgcaatcaaacaaagagtatactgaagaggatatcacagatgaagtacttaaaggaaggctgttccatttagctcatctgacggtgccatggtgtggttgactttcctggg

SEQ ID NO: 21275 - DNA, 310 bp, Glycine max
  Clone ID: 700763788H1
cacatgccttctcttcttctgcgtttccggaactgaatcctataaaacctaggcactcacgtcttctcaggagtgccgtgcaacatgaaactcctacatcacagctttctgaaatatggtcacctctggaaagccaaggatggaaaccttatgttgaatcaaataagccaacagcattaccagagaagtccgagggatatatccaggtctttcttgatggaggtttgaaccaacaaaggatggggatatgtgatgcagttgctgtggcaaagatactgaatgctactctggtgattccataccttgaatt

SEQ ID NO: 21276 - DNA, 306 bp, Glycine max
  Clone ID: 700763789H1
cggctcgagtctgaggcctgtgctgtgctctgaggggccatagtttgggaccctttgaaccctaatctccacccaaacccattttcccgggaaattgccttggaaaagaaagagcgaagagggaaatgcagaatcacaggctgaagcagcagcagcagcagcaacaacaagctcttatgcagcaagctcttctccaacaacagtctctctatcaccctggcctccttgctcctcgtcagattgaaccatatccaagtggaaatttgcctcctggttatgatccaagtacttgccgcagtgtgtatg

SEQ ID NO: 21277 - DNA, 302 bp, Glycine max
  Clone ID: 700763791H1
atggagacctgaactgaagaggcttgctaatgtttttctttcttatgtctgtaactttttcaccctttgtcccctttcacttgtgtacaatcaatcaggtggcaaagactggtaaaggaaagagagacccagtcattaaacaagaatagatgttcctccgtggagattttgtcatcattgttcttatctaaacgagattctgccatcattgttcaagtaaatggctatgtagacattctggcataaagttttgatgaggaccccgtgagttattaaatgaatttccggatatgtcatgtaaa

SEQ ID NO: 21278 - DNA, 289 bp, Glycine max
  Clone ID: 700763792H1
tctgaacaatggcgtctctctctcacctcaacaaactcctctgcatgcccccgctcaactcttcaccctctatttcgccaccacgcagcagcgtcggaatttggaccaaacctgtcggaaggccgaggctactggtgcgtgtccgagcggtcacgagcgacgacgagtgggggccggagaaggaggaggcgtacggcggcggcgtacaggtggaggagaaaccgacgaatgctagacggagacggagaagctgaagaaggcttggtggattcgttttatggcacgatcg

SEQ ID NO: 21279 - DNA, 305 bp, Glycine max
  Clone ID: 700763793H1
ctaatcctagttatttgatttatatactttttttatagtaaatacatgagatagaatattcaaaatggaatatttctattattttattcttcatccaatgactatacattcattatatttttgtgtaaatagaggaaaaactcgatggaaaaatggtggtttaattctatgttgtttaataggaagttagaatacaggtgtgaattaagtaaatcaatggatagtcttggtcctattgaaaataccagtctaagggaagaccctaaaattttaaccgatatagaaaaaaaaattcacagggattt

SEQ ID NO: 21280 - DNA, 309 bp, Glycine max
  Clone ID: 700763794H1
ggaagcaacataattgagtagtggtgactagtctgttctctgtggaaaagttgttgtgtgaagagaagcgaatggtaggattgaatgtgtctcagccatttttgtcaccgatttgcaagacggcaccttacccacttgatctcatagccaccgccgcgtgcctccacttcggccaccttctccgccgccgcgccacccaccatccccgccttggggttcttcttcactcctgtttcaagattgaaggattagtggtgtcagagatgccttcaactcaatgggttgaactatcttcaactatcaactggc

SEQ ID NO: 21281 - DNA, 304 bp, Glycine max
  Clone ID: 700763795H1
gctgatctcatccatttttgggataagttccgcaaagctcctgagggttctctcaggaaaaatacagctcagaaacaagttttggaagcaatgtctcacagaatgcatgtagacaacagtgtaaaactgattgggaagcttttatttggcattgaaaagggtccagaagtactcaacgctgttagaccggctggatcggcacttgttgatgactggcactgcctgaaaaccatggtgaggacttttgagacacttgtggatcctgtctcaatacggatgaaacacatgagtctttgcaacatct

SEQ ID NO: 21282 - DNA, 351 bp, Glycine max
  Clone ID: 700763801H1
attttctgttaggtctgttggtctagttgctgagataaagagactgcttggtgtggttcaagacttgagagagagtgagtgggacttgcagttgatattggaaatgtttagacgtgagtccattgattcaagggatgtcatggatgcaagggaagcagaatacagagcatgggctcatgttcaaagtttgaaatcatctcttgatgagcacaacttagaacatcgagttaagacagccaatgaagcagaggcaagatctcaactagaagctggctgctgctgaagctgagatagcagacatgagactagaattagcagattctaagaggcaaatgtgtgacttgtctgatg

SEQ ID NO: 21283 - DNA, 321 bp, Glycine max
  Clone ID: 700763802H1
aatcatgaagtttctggctgttcagggtctcttcactgcatcacttggctctgaggtgacttcggttgagttacaggaggaattcaaggtggccaaaatctcccacatcgaatgctctttgtaagatgtgtatagaccagctgcaattgttgttagcaaatgctcagaaaggggagggcagttgtcctttggccaacagcgttgagccaaatgatcttggttcatacttcatgaaattctatggcaccttatgcaacattccttcagtttcctcttccggtcttagatgatgtggatcacaggcagtaaaaaatgcaggca

SEQ ID NO: 21284 - DNA, 339 bp, Glycine max
  Clone ID: 700763803H1
tagaaacctctcagcccctctccgatcaaatggccaccgtaatcgacggcaaagccgttgcgcaaaccatccgatctgaaatcgccgacgaggtgcgcaactctctcaaaaatacggcaaggttccgggattagcggtggtgatagtagggaacagaaaagattcacagagctatgttggaatgaagagaaaggcatgcgctgaattgggaatcaaatccttcgatgtggaccttcccgaacaagtctcccaagctgaactaatcaaacaagttcaccagttgaatgctaaccctgacgtacatggtatattggttcagctcccgttgcctaagcacat

SEQ ID NO: 21285 - DNA, 331 bp, Glycine max
  Clone ID: 700763804H1
gcaatgttttacaagtacctgttactttctcttcatctgttggtgaatctgctgtttttaaatttggctcttctgactcaaagccgataagctcaatcagctcaactactgttcctggtgctgttgattcaatgccaaaagctcttgattcagacaatgctggtgctaagactaatataatagctggtttctctgctcggttatctgaaccagctgtttcttctgtggcatcgatgccatcgttgacatcgcctgcaaatttatttacctttggcaacaattcaaatcaaaataatggacctgctgcttcaagccctacattttcctctcc

SEQ ID NO: 21286 - DNA, 335 bp, Glycine max
  Clone ID: 700763805H1
ctcgagccgctaaaacatgcatccagtgatttcaagaaaatggggcaacgaatatttatattcattgttggtggagcaaccagatctgagcttaggatatgccacaagcttactggtaagctgaagagggaagttattctaggctcgtcaagtatcgatgatcctgcacaatatattacgaaattgaagatgctgacagcacaggaactttcattggatgatctccagatatgacgtcacagacttgaaaaatggaagatgatcttccttccgcttgtctaatatacgtgttgtaaccatattgtttattcatctcatgtaagaaattctttgga

SEQ ID NO: 21287 - DNA, 337 bp, Glycine max
  Clone ID: 700763806H1
gttcatggtcttgctggggcatttgctcttggaataaagaaacttggaactgtggaaattcaggaccttcccttctttgacactgtgaaggttaagacttccaatgcacacgcaattgctgatgctgctctcaaaagtggaataaatttgcgagttgttgatggaaacactatcactgttgcttttgatgaaacaaccacattagaggatgttgataatcttttcaaagtttttgctggtggaaagcccgtctccttcacagctgcatctcttgcaccagaagttcagagtgcgattccttctggattagttaggaagagccttatctgacgcacct

SEQ ID NO: 21288 - DNA, 333 bp, Glycine max
  Clone ID: 700763807H1
ggtagaagcaactcaggtaaagtatgggaaaaatatgccagttgcggcagtgcagctgagctctgctgttgttgcatcttctatggtagttgctgtaacaaagtcgaacgctgactcgaatcttgagattcctgtagcagcagctgctacagctactgctgcagctgttgtagcaaccactgctgctgtaagtaagcagtatgagcagggaagttggagtggtggtgatacagagggtgctggttgtgagccgaagtgtagtggtgatggagagcataatgctttaggagaaacacagaaggcgagagaaatctgatcgatcagtaagtaatg

SEQ ID NO: 21289 - DNA, 344 bp, Glycine max
  Clone ID: 700763808H1
ggaggggtgagcaaaatcaaagacggatataacccggctacttggatgttggaagttacaacttcagcacaagaacttagtttgggtgttgattttactgacttgtacaagaattctgatctatataggagaaacaagcagcttatacaagaactgggtcaacctgctcccggttcaaaggatctttatttccctactcaatactctcagtcattcttggtccaatgccaagcttgcttatggaaacaacgttggtcatattggcgtaatccaccatacactgctgtgaggtttttcttcactactttcatagccctgatgttcggaacaatgttctgggacct

SEQ ID NO: 21290 - DNA, 346 bp, Glycine max
  Clone ID: 700763809H1
cacacttgggttatatgtatagttcaaactctctattcaattcagggttgtggatattgaagaagctcaagggcacacaatgcattcaccaacttaccttcacagatgaccctgatcttgagaatactttcatctacaatctttccaaggagaagacactggctaacttccagaatgtgcttcttttgtcctcacctcaggatggctatgttccataccattctgcgagaatagaaccatgtccagcagcttctttggatttctctaaaagagggaaaatcttcctggagatgctgaataattgcttggaccagatccaagctcacactaacgatagggtggtcat

SEQ ID NO: 21291 - DNA, 310 bp, Glycine max
  Clone ID: 700763784H1
cacttctattagtccggatggaaggttgttagctgttcttggggacagtactgagtgcttgatggctgatgctaactctggaaagattactgggagcctaaaggggcacttggactactctttttcatcagcttggcacccaaatggacaaatattggccactgggaatcaggacaaaacatgcaggttgtgggacataagaaatctttcacaatctatggctgtgttaaagggaagaatgggtgcaataagagcactaagattcacttcggacggacgatttttggccatggctgaacctgcagacttc

SEQ ID NO: 21292 - DNA, 306 bp, Glycine max
  Clone ID: 700763757H1
ttccgctccaaggattcaaggcacataagtgaggttgtgcagtccattaaaacactcaggcgtcaagttgtagcaagggagtctgagagagctgagagggccaccttggttactcaagagaaactgcaacttgctaataatagatttaagccaatacgattgtccgacctttggatccgtcctgcttttggtgggcgtggaaggaagatacctggtacacttgaggctcatgtgaatggatttcgttattctaccactaggcaagatgagcgtgtagacataatgtttcccaacattaagcatgca

SEQ ID NO: 21293 - DNA, 311 bp, Glycine max
  Clone ID: 700763758H1
atcagcagaagtccatcaaaaggatacagaaagctacaagctgtcttaaaaacaataatgttacgtcggacaaaaggctcacttcttgatggggtagctatcatttccttgccacctaaatctgtagagttgaaaaaagtggaattttcacaggaggaacgagatttttattccaaactagaggctgattcccgagcacagtttcaggaatatgctgatgctggaactgtgaagcaaaactatgttaacatttcgttgatgcttttgcgccttagacaagcgtgcgatcatcctctgcttgtcaaacgtta

SEQ ID NO: 21294 - DNA, 307 bp, Glycine max
  Clone ID: 700763759H1
tgctccaagtatgtttttacaatccttcaaaaattttgtttctttgtgtgtgtatggtgatgataacttaattagtgttcatgaatatgtcaagccttactttagtggttctaaattgaaaagctttctagctggtcataatatcaccattactgatggtattgacaaaactagtgcaactttgcaatttagaaagttagcagattgtgattttctcaagagaaactttaagcagatgtctaatgttttgtgggtggctcctgaggataaggcgagtttatggtcacaacttcattatgtttcgtgt

SEQ ID NO: 21295 - DNA, 300 bp, Glycine max
  Clone ID: 700763761H1
ctcacaattattccacaaaatttccctcaattatttctcaccatcatcaccccctttccttctctcaagaaaaaaaaaagttaatttcttgaacccaatggcttcagagacagaggtgccggatattatttcctctgttttcgaaaggtttcaacaaaacagagacatgtctctgtttctgcccttcctcttcggcttctctgacgccaccccaggacgaaatagcgacgacccagatcacgaaactgctcccacagaagccccacaacgtcaaagaataatcttgggtgaacccttgac

SEQ ID NO: 21296 - DNA, 313 bp, Glycine max
  Clone ID: 700763762H1
caataaataacagaacttcatctgttttctttgtcctcaccaagccagagagagaaatggaagaagcatcatgtgtatgcttagttgtcatactgatacttgctctaacattggcatggagggtgctgaactggttatggctaaggccaaagaggttagagaggctcctaagagagcaaggccttcaaggaaatccctacaggcttttggttggggatttaaaggagattatgaatatgcaaaaggaagtcacatccaaacccatgaatctctcccatgatatagtgcctcgtgtcttttcctttctccaaca

SEQ ID NO: 21297 - DNA, 315 bp, Glycine max
  Clone ID: 700763763H1
cgcatctaaattctaaacactcctccgacctataatacccttttctattttcattgttgaagctcacaagcaaaggctaaagtagattagattctcctcaagcaaaacctagagctcccacactcctccactacttagaatattaaaagccccttccttcatcaaggtactactgtttcatcttccctcaaagattggaacaacaacaggaacatgggtactctaacaactgttcctgtgctcccttctaagcttaacaagccttcgctttctccgcgtcacaattctctttttccctactacggaagacgcgtc

SEQ ID NO: 21298 - DNA, 322 bp, Glycine max
  Clone ID: 700763764H1
ctctaacctctgcaaaagtccaaggttgcacggttttaactgcttaggtttttgtcttcaaaattaaaactgtgcaactttggttgcaaagtcataggggttaagttgtgtttgcatgaaagtgggcttgagataattgtgcctcttgtatgatggaatccctttggaagcttttgtatttgctggagcctgcgcctgtcacacttatcactacagctgtggctgtgacatttggtgctgcttttcgagctctaaactatgggaaagaaatggagcgtaatcgggacttctctgaagcatcgattacattggataggtctca

SEQ ID NO: 21299 - DNA, 324 bp, Glycine max
  Clone ID: 700763765H1
aggaaagtttaaagccactgattctcctcttccgactgttccgggctatgatgttgcgggtgtggtggtgaaagttggtagtcaagtgaaggactttaaagtgggtgatgaagtgtatggagatgtaaatgagaaagcacttgaaggtcctaagcagttcggatctttggctgagtacacagctgttgaggagaaattgttggcaccaaaaccgaagaatttggactttgctcaagctgcttctcttcctctagcaattgagactgcttatgagggtttggagaggactggattttctcctggtaaatctattcttgttctaaa

SEQ ID NO: 21300 - DNA, 316 bp, Glycine max
  Clone ID: 700763767H1
ttttaaaattgcacttgctcagattagaatctgttctagactggaagccttattgctgaagaaaaaaaattcaagcaatggagagtctcccgaaattcatgctcaaaaggttgataagctgaaggtattaacggagtctcttgccaactctgctgcaaaagctgaaaagcgtattttagataacagactacaaaaagaggaagcattaaaggttcgagtgactaaagatggtgaggctagtaaaaaggagaaggaactggttgctgagatatctgaactgcaatgcaagatagaagatcttgaagctgtattgaaa

SEQ ID NO: 21301 - DNA, 312 bp, Glycine max
  Clone ID: 700763768H1
tgagtattggcagcaagacaagtggaatggctgctttcctcttaagtggcacgttgttaaggatgttcctaacaatttgttgaggcacattaccctggataacaatgagaacaaacctgtcactaacagtagggatacacaagaggtaatgttggagcctggcctgaaattaatcaaaattttcaaggaatataccagcaagacatgcattctggatgattttggcttctatgaggcccgtcagaagactattttggagaagaaagcaaagcaacaattcccaaagcaggtatgggaagggaaactgctgat

SEQ ID NO: 21302 - DNA, 315 bp, Glycine max
  Clone ID: 700763769H1
aaatcgatatagatagattttatcttatagaaataattgaaaaatacattcaattatgtcttcgcgtatcaaatattttcttttcatatcgatgcgtacgatatttttccagcaattaatgtatgtgagacagaaactttcacttacagttttttctttttaatattgtatttcattttttttaataattaataaaataataataataatgaataaaaaaatcaaataataattaataaaaagaaaaaagtgtaaatcaaatagaaatttataaaatctatgatcctagagtagttccctagacaaaatagaagt

SEQ ID NO: 21303 - DNA, 106 bp, Glycine max
  Clone ID: 700763770H1
ctcgaccgtttggatttgtttttgttttggttaagtaaacatcttatgtgtttgaatgagacagaatttctcagagtcctatgttatatactatttgttagttatt

SEQ ID NO: 21304 - DNA, 99 bp, Glycine max
  Clone ID: 700763772H1
gactagttctagatcgcgagcggccgcccttttttttttttttttttgggcaaaaaaaaaaccccagcctgctggctggaaagcccaaaaaggggtttt

SEQ ID NO: 21305 - DNA, 298 bp, Glycine max
  Clone ID: 700763773H1
cacaatcatgtcagataaagaagtagtagtaaatgggttatctgaggaccaagcatggcaagagctcaagtttccagagttgttgaacagtgatgctgttagagaaatccatgcaactattgaaaaagaatgggattttcttcaaaggtcagcttgccaaaccgctgcgggaagggctctgtggaagcatgccatccatgatccactggctgacgtgctggcaggagagacttacttgagaaacctccatgaaaagatcaagaaagacattctcaacaatgctcgggaaacttccgga

SEQ ID NO: 21306 - DNA, 309 bp, Glycine max
  Clone ID: 700763774H1
gaattttctttctctaaacttctctctctctctctccctacaaattcatttttctcgtttcttttccgagaaagttcattcgcattgcccatctgtgcttgcgtatctgttgatcccgctctgattctatccaattctcacacgcgtttatcccttgttctccaaatatgggctcagtgtgaagttgatgtggtcaaagtcacaatggattcacatgtaatatgatagagacatcacctagccaactgggctttctgaaggttgcaacatgttgatggacctttcgctttttgtagatcacttctacaa

SEQ ID NO: 21307 - DNA, 308 bp, Glycine max
  Clone ID: 700763775H1
ttgagagcctggcaggttggcttggtggatgctgatgctggtgcagggaagactgtctctgggaacaatatgaggcattccaaagatggaagcagcccatcactgttgatccactatgctggtccaatgaaaacctctgaagatactccaacaaatggatctactgtgccccctggcagacgccttgttgttccactgcagatttgtgttttgcagggtttgtcttatgtgaaggctcagcgtctttcaatggagtttcctgctcatgtcggtgaaactcttccgaagttggatgacttagataacaa

SEQ ID NO: 21308 - DNA, 303 bp, Glycine max
  Clone ID: 700763776H1
tgttgaaagttcctctctttcggatcaccacatgaccgtttccttctctgttattttcccaaatagaaaaaaaaaacaaacaccccccctctctcttctttgcgttcttggcgtcttttcttgctgcgaaagttacctctcattttgctattccatgtagtttttgcctttgtgggattctttgaccgacttctttctttcctcctagactctctttttggttttccgagcccaagttagcctttttcttttgccattctcgttgtgtggaagattctaccaagtgggtgtgtgtgtttgtct

SEQ ID NO: 21309 - DNA, 295 bp, Glycine max
  unsure at all n locations
  Clone ID: 700763777H1
cggcgacagccattcggagggtctagcatctctcatcatctcggtncttttatcgtttctggctcgttcgtggggtatcggtttgtgtcgattctcgttctgtagggatttgtcatgcctatacgatcgccaattacactcttctttgatcattcagtgatttcttctcttagcacttcctatatcgatttcctcgttaggttttgccttggagaccttaatctcgtaaaaccagcggttcaattcagtgttccctagaatctagggtgtcgcttcgaaaatgcctccgaagacg

SEQ ID NO: 21310 - DNA, 268 bp, Glycine max
  Clone ID: 700763778H1
atgggatgggcttgtgttggatctattccgtttttttttcctttattttatttggtctagaatattggcccattattttggttactaacaccaggtatggtgattggtaattctttttttttggttttgaatagtttatccagatttcacctcgatggagacttgtttaaaaatttttgccaaagaaaacaattttatgggccgttcctatttaatgttttcttaaattttgatgtttgatatcaaaaaaaaaaaaaaaaaaggggcg

SEQ ID NO: 21311 - DNA, 316 bp, Glycine max
  Clone ID: 700763782H1
ctcgcagccccgagtctgtgcaagcaactatcaaagagcttgaggaaaatctaaaggaaggcattgccaatgcagttggctcttctctgacaaagctttcacatgcaaaagttgtaggcattgcttgtgatgtttgtgaacctcatgatgtgcagagactggctaacttcgctgtcaaagaacttggtcatattgacatttggataaacaatgccggaacaaataaaggttttagaccattgcttcagtttagtgacgaagatattaaacagattgtctcaacaaatttggctggatctatctctgcactcgagaa

SEQ ID NO: 21312 - DNA, 293 bp, Glycine max
  unsure at all n locations
  Clone ID: 700763783H1
gtctgctgctacaaaagtctcccttccaatgatcatctgaaattacataggatttatagggtcatcaagaactcttcagcatcacaaaaggtgatttataatcaaaaagcaagggacagacacacagaagttgttatcttgaatcagaaaacatgatgctaagaagctcttcaacaccagttcttggatccctcctctcttccttcacagatagccctaacaacaatattcactcagaaacctgtcatgcactgaaacactttccaccaaccactgtcncacaacattatcac

SEQ ID NO: 21313 - DNA, 316 bp, Glycine max
  Clone ID: 700763756H1
aaaaagcctccaaagttgtggttcacactaaagatccatcttatccagaaaagatgattaaatttgcagttatggatagcaccaccggaagcttatcaacaaagacagggataagttctctgaccaacattagtggtgaaactgaaagctctcatgtaattgaggatagaaacattgccatctccattcaagatctacgcaaggtcaccaataactttgcttcagaaaatgagctaggccatggtgggtttggaactgtttacaagggtgagcttagaaatggtaaaaaaatagcagtgaagagaatggaatgtgg

SEQ ID NO: 21314 - DNA, 319 bp, Glycine max
  Clone ID: 700763730H1
tcaaaacactcataacacaaagcacaaagcaaagctcatccttgagttaaaaaatggcagcagcttcttccatggctctctcatccccatccttggctggcaaggccgtgaagctgggcccatcagccccagaagtgggaagggtgagcatgaggaagaccgtcaccaagcaggtctcctcaggaagcccatggtacggcccagaccgagtcaagtacttgggcccattctctggcgagcccccgtcctacctaaccggtgagttcccaggcgactacggctgggacactgctgggctttccgcagacccagaaacttt

SEQ ID NO: 21315 - DNA, 317 bp, Glycine max
  unsure at all n locations
  Clone ID: 700763731H1
attcgagcgaatcggctgaccatgcaaaatgtttttattgacataattcaacttcatcacttccagttaaaattgattcataaccttttgatcagttttttccagaggctagcgaagttgactttgccagacaatcagtttttagtggatgttcttttaagttggactatttgacaaagccttcattttttgaagattttggctttgttgagaaaataaaaatgtcagacagggtgaagaccggagatgaacttttcttggttggctacccatattttaatgtcaatgaaatgctcgttgtnggaagactttataaa

SEQ ID NO: 21316 - DNA, 325 bp, Glycine max
  Clone ID: 700763732H1
cgaatcttggtttattgattggtggaatactaggcaatccgaaattttcttgaatgatattaaagaaaagagtattctaaaaaaattcatagaatttgaagaactgtttttcttagatgacatgttaaaggaatgtccggaaacacatctacaaaacctgcgtactggaatctataaagaaacaatccaattaatcaaaacgcacaacgaagatcgtatgaatacgattttgcacttctcgacaaatataatttgtttctttattctaagcggttattctattcttggtaatcaagacttgttcttattactctttggttcgaga

SEQ ID NO: 21317 - DNA, 331 bp, Glycine max
  Clone ID: 700763733H1
ggaaactcgtccccatcgaagagcttacttgacctcgcaccacggaatcgttccctactaattcaactcaacaacactatcgtctccattcactagttagaaacgtgcgttccaatgtctgatcctgccgaagaggctgctttcatcgagaagctctacgaatacggcgagcaactcaacaatgccaaggacaagtcgcagaatgtgcaggattaccagggaatcatagatgcggcgaagacgagtgtgaaggcgaacagctcgctgcacagctgattcccaggttctacaagttctttcctgacctttctagccctgctctcgatgcaca

SEQ ID NO: 21318 - DNA, 325 bp, Glycine max
  unsure at all n locations
  Clone ID: 700763734H1
ctacattcccatcccccagcgccagaccgacctccccttcctcctcgccgtcgaagagtcttttccatcaccggccgtggcaccgtcgccactggccgtgtagagcgtggcaccatcaaagtaggggaaactgttgaccttgtaggtttgagagaaacaaggaacacaaccgtcacaggtgtagaaatgttccagaagattctagacgaagccctggctggagacaacgtggggctgttgcttagaggggttcagaagactgacattcagaggggaatggtgttggctanaccaggcacgattacgccgcacaccaagttctcag

SEQ ID NO: 21319 - DNA, 316 bp, Glycine max
  Clone ID: 700763739H1
agaagctctgggcatttactctcatgattttgtgcctgtcacatattcttctgaagtggtttggtaccaggaattgatgaggtttgctccaacactgttgcttttgggatctctcttgtatatgggaaggagaatgcaaggtggaattggtgttggtggcagtggtggcggcaagggtgcccgtggaatattcaacataggaaaagcaccagttactaaagtagacaaaaatgccaaaaacaagatctattttaaagatgttgctggctgtgatgaggcaaagcaagaaattatggagtttgtccacttcctcaag

SEQ ID NO: 21320 - DNA, 319 bp, Glycine max
  Clone ID: 700763740H1
aagattttgagagcaaaatctaaattagaagctgtgtctgctgcagaggaaaaggtgagatctatagtcatgagcctgtctcatactcttgaaaagctgaagacagaaacagcagatgcaaaaaaaggaaaatgaggatgtaagccaagaggttgcagccagcaaggaagagattcaaaaagttgagtttgagatagacatgacagaggaaagattgcaaggcatcatgcaagagctggaagtagccaaagcatcagaagctctagcttagagaagctgaaaactcttactgagaccaccatgagagaaagagctttaa

SEQ ID NO: 21321 - DNA, 311 bp, Glycine max
  Clone ID: 700763741H1
gatttatctgctccttgggctggtgaaatagagcaaaagattctaagctcaccagaagttggaattggaccttatgtggaggtagctttctaccacaaaccttcaaaaacactattggtgacagatgctgttatttttgtcccaagacagccacctgagtgtataagcaaagaatccttattagcatcagcaaaaaatggcttggctgttaaacttcttagtaaaggaaaggaggtacctgacgagccagtagttgacgacaaaaggaaccgacaaaaaggatgggaaagaatggttctacagatcttgtt

SEQ ID NO: 21322 - DNA, 311 bp, Glycine max
  Clone ID: 700763742H1
gcctactacacattcttcatcacttcattcaacatttctccccttagcttgtttcaccaatggctgctgcggttagtgctgcagtctcttttccatccaccaagtctacctctcttccaagcaggacctccctcattgccccagagagagttgtgttcaagaaggcttcattgcaaaacagagatgtttctagcagtggacgggtagtttccatcagagctcaagtcaccactgaggcaccagccaaggttgaaaaagagtccaagaaacaggatgaaggtgtggttgtgaacaagtttaaacccaagacc

SEQ ID NO: 21323 - DNA, 310 bp, Glycine max
  Clone ID: 700763743H1
gtagtctctactctgattgggatcttctccctccaaagacaatcaaggatcctgaggctaaaaaaccagaagattgggatgacaaagaatatattcctgatcctgaggataagaaaccagaggggtatgatgacatcccaaaagagctcccagaccccgaagccaagaagcctgaagattgggatgatgaggaagatggtgagtggacaccccctaccattgccaaccctgagtacaagggcccatggaaggcagagaaaatcaagaaccccaactataaaggaaaatggaaggcaccattgattgataa

SEQ ID NO: 21324 - DNA, 311 bp, Glycine max
  Clone ID: 700763744H1
atcttttgtttgttcttcagtactttagtgtgtgatttaattccaagattttgagaatgtctagctgtgggtgtggaagtagctgcaactgtggcagcaactgcggttgcaacaagtactcttttgacttgagctatgttgagaagacaaccacagagactcttgttttgggtgttgggtctgtgaaggcccaattggagggtgctgaaatgggtgttgcagctgagaacggtggctgcaactgtggatcaagctgcacctgcgacccatgcaactgcaagtgaggtcaagatttataaccttgaagcaga

SEQ ID NO: 21325 - DNA, 311 bp, Glycine max
  Clone ID: 700763745H1
gctctttctggtgttgttgatctcgttttctctctcaaacaaacactactctctctctctctctaacgataaccctcgcagtcgcaggtttcaattcaccatgaccgtgatgatgcccgctcccattgatcagcaagaggacgaggaggttctcgtgccgcacgcggatttgcctgcgaacaatcaccaacccatggaagttgtagctcaacctgaaaatgccaataccgtggagagtcaacccgttgaagatcctccatcatctagatttacatggagaattgacaatttttcaaggctgaatacaaaga

SEQ ID NO: 21326 - DNA, 312 bp, Glycine max
  unsure at all n locations
  Clone ID: 700763746H1
cctacgtatactacgtatactacacatttcatttgcctcttgtagtagccatggttttccaaacaaacattaatcttcacttcgtattgtttcctctcatggctcaaggccacatgatccccatgatggacattgcaagactattggcacggcgtggtgtgattgtttccatattcaccaccccaaaaaatgcatcacgattcaattctgttctttctcgtgatgtttcatcaggcctcccaatccggctagtacaactccattttccatccanagaagcaggactacctgaagggtgtgagaattggacat

SEQ ID NO: 21327 - DNA, 314 bp, Glycine max
  unsure at all n locations
  Clone ID: 700763747H1
ctaggtgcaaccttttcatcgatctatcaccctctttcatatattcctaacttgtcccccaaaatcaaatggctgcgaaacggttttttgatgattctgatcaagacaataataagccaccaggcgataaacggatgagaactacaccaagaccttcttttgcttcggtaataggagaagtggtgatggtgaaaaacttgcagaaccttttctcaggcttggagcccttgcttagaagagtggtgaatgaagaggtggagcgagtgatgaggcattgtactgtgccacgtacaataagtaggtcnccttcgttg

SEQ ID NO: 21328 - DNA, 324 bp, Glycine max
  Clone ID: 700763749H1
tcttgaaagagtctgggctattggatacttgaagagttctcgtcgggttgtgattggctatgatgaaggaacaattatggtcaaacttggtcgagaagttcctgtggctagcatggacaacagcgggaaaattatttggtctaagcataatgaaattcagactgtcaatataaaaagtgtaggagcagatgtagaggttgctgacggagaaaggttacctttagctgttaaggagttgggtacctgcgatctctaccctcaaaatttaaagcacaatccaaatgggaggtttgttgttgtgtgtggagatggtgagtacattat

SEQ ID NO: 21329 - DNA, 323 bp, Glycine max
  unsure at all n locations
  Clone ID: 700763750H1
ctcgagccgttttaaaacagctcaaccttggtgaaggaacacttatagatgtcaaaacagaagttaattacttcgaatctacagacccaataccggcaggagtctacaaattcataaagaacgaaaacccaacaaatcaaggaaatgctcctggaagtagtcaagctacaacaccagtaaaaaaacaaaactcttcgccctctacttcttccgtttcctcaaagacaaacaaagtcccttggggtacgatattcgaagccanaatcaaattatatgacaagagagccgatgaattcgataaggaagaactttctgatcaagtg

SEQ ID NO: 21330 - DNA, 317 bp, Glycine max
  Clone ID: 700763753H1
tggcgcgcaaatttacttggcagccggcaggtttgatgatgctgtaacagcatctgagcaagcagctaaactagatccaagtaattttgagatgaatgcagtggtgaggagggccagagcagtgacatcagccagaatgagtggtaacttactcttcaaggcatcaaaattcacggaagcatatgctgtatacaatgaaggactagagcatgatccacacaactcagttctgctatgcaatagagcagcgtgtcgttctaagctaggtcaattcgagaaagcaattgaagattgtaacgtagcacttataattcaac

SEQ ID NO: 21331 - DNA, 313 bp, Glycine max
  Clone ID: 700763754H1
agaatgagcaccactcaagcttcctccaacaacaagaagaacaaacgcaatcacaagaaatccctctccctccccgcccgtaacggaatcacccctccggatgatggcggagaaagaaccgttaaaaagcttcggttgtcgaaggcgctcaccatccccgacggaaccaccgtctctgaggcctgcaggcgcatggctgctcgccgcatcgacgccgttttgctaactgattccaacgccctgctttccggaattctcactgacaaggatgtggctactagagtcgtcgccgaggggctgaagcctggagaga

SEQ ID NO: 21332 - DNA, 310 bp, Glycine max
  Clone ID: 700763755H1
cattgccaaagctcatggaggtgtatctgtatttggcggagtaggtgaacgtactcgtgagggaaatgatctttatatggaaatgaaagaatctggagtaattaatgaacaaaatattgcagaatcaaaagtagctctagtatatggtcaaatgaatgaaccgcccggagctcgtatgagagttggtttaactgccctgactatggcggaatattttcgagatgtcaatgaacaagatgtacttctatttatcgacaaatctttcgcttcgtccaagcaggatctgcagtatctgccttattgggtcgaa

SEQ ID NO: 21333 - DNA, 312 bp, Glycine max
  Clone ID: 700763729H1
cgatcttgagatcactacaacacacccaaacagagccttattcttgagaaacaagtttcttcttcaaaacaacatgtctggaaccgtgattgtttttgactttgacaagaccattgtcgatgtcgacagtgacaactgggtcatcgacgaattgggtttcaccgatttgttcaaccagcttcttcccaccatgccttggaactctctcatggacaggatgatgatggagcttcattcaaaaggtaagaccatagaggacattgaagaggttctgcataggattcctttgcacccaagagtaataccgctatt

SEQ ID NO: 21334 - DNA, 322 bp, Glycine max
  Clone ID: 700763705H1
ccaatacctgccaagtctgtgagcgcagctccttgattccttcaacttctgctctcttggttgtaagattgttggaacctccaaaaagttccgaaataagaaaatgttaggtgaggcagatggtgaagaatcagttaacggtataagaaataatgcaagtgccagaaagaaaatccacagctttacaccctcaacaccaccaccaacagtggttaattacagaactgccaagagaagaaaaggaattccacatagagctccaatgggtggagggcttattatagaatactaatgttgtatagtggttttctgtcacttacca

SEQ ID NO: 21335 - DNA, 297 bp, Glycine max
  Clone ID: 700763707H1
tatcgagcgaattcggctcgacggctcgagaactcaaatggtaccgatcgagtcgtgctgcccagaccatttatcatcaaccttttggatgtgtctgttttcaacaatacaagctgccctatttgcccttctttcagagtcggatcttcaagcatggattctacaatcacctttacagatatcatgttctttatatgcagtaagttccaagccactcagcaaaaagttcaattagtaattttttgttgtgtagtacaataccggcactgttaatcattagcaacttgaattattgtt

SEQ ID NO: 21336 - DNA, 320 bp, Glycine max
  Clone ID: 700763708H1
tgttggaatggtctaacagtgtgaaaaagttttaaacttgtatccaacaactatgaatggtcgtgggttgactttttggtaacttcaagtggtgttttgattattggttatttgttggctttggttgtgttgggttatgtttttctaccactatggctgtgattattcagaacaaaagaataaagaaagaaaggaaatgtttatacggatgcttcaatttctgaatgatttcacttattctttgttagagatcttattaaccagtcatatagacaaaatagtgtatatatggggggacatctttgtatgtatcctagtgg

SEQ ID NO: 21337 - DNA, 313 bp, Glycine max
  Clone ID: 700763710H1
gcgcattatagcacaccacacaaaaaagcaaagcagaaaacaactgttacttacacacgccatgggtatgggtatgggtatgggtatgggtaaatgagtggtaaatgagtggtttttgagcagaagcagttaaaagagaaagggattcagcgaagatgacatcggttggtgtggcaccaacttcgggtttgagagaagccagtgggcatggagcagcaggtgttgatagattgccagaggagatgaacgatatgaaaattagggatgatagagaaatggaagccacagttgttgatggcaatggaacggagac

SEQ ID NO: 21338 - DNA, 314 bp, Glycine max
  Clone ID: 700763711H1
attcaccgctgagagaacatcacaacacaacaaacaaaggagcctctcggtttccaatgtgaagagagcgaacatggctctaatcgctgccaggattctcggttccaattcgaggccggcggtcgcgctccaccgctggcagtggctggcgtactcctccgcctccgcggcggtggcggagccggagaccacggaggtgaaggactacgccgattaccggcgctccctgtacggacagatcacgcacaaggcgctcctcgtcgacgccgttggcacgctcgtcctcccttcgcagcccatggctcagatatata

SEQ ID NO: 21339 - DNA, 316 bp, Glycine max
  Clone ID: 700763712H1
gctggagaactaccccggcgtgaagcgcatcaccatcaagccccaaactgacagatgggtcttccctgagaccaacaccggtatcattgtcttggctgagggtcgattgatgaacttgggatgcgccactggacaccccagttttgtgatgtcctgctccttcaccaaccaggtcattgctcagcttgagttgtggaaggagaagagtaccggcaagtacgagaagaaggtttacgttttgcccaagcaccttgatgagaaggtggctgcacttcacctgggcaaacttggagctaagctgacccagcttagcaag

SEQ ID NO: 21340 - DNA, 315 bp, Glycine max
  Clone ID: 700763713H1
catttgtgaactaacaacaacacaaggccatcatcatggcagctgcttccccaatggcaagccaactcaagtccaccttcactaggactcttgtagctcccaagggcctctctgcctcttcaccacttcacctcgtgccttctagaaggcaatttagcttcactgttaaggccatccaatcagagaagccaacctatcaagtgattcagccaatcaacggtgacccattcattggaagcctggaaaccccagttacatccagccctttgatcgcatggtacttgtccaacctgccgcatacagaacgcagtgagc

SEQ ID NO: 21341 - DNA, 322 bp, Glycine max
  Clone ID: 700763715H1
tgggagatcgcacgggaattccgggcttctccctctggtgtgtgtgatgttcttcttttttcttttttttttcctttttactttattacctatatatgcttctgccactctccttaccacggatacatcgcaggactcgcgtttgtcttcgatctaacaaggtattatctattactttcacaatcaggcgtaagggttttctttttaccgtgctaataatagctaacaacgcatgtgcaattgataacattaatggaagcaagtaattcgtatatgagaaacgattcaaagaagtttatgtgttcgatgctttcgatttggg

SEQ ID NO: 21342 - DNA, 328 bp, Glycine max
  Clone ID: 700763717H1
ctgctcgagcagctcgacggctcgagcggctcgagcactatgcaatcatgagctcttatgagtaccttagcactggacttaaacagtacaacttggataacaacatggacggtttttacattgctcctgcttttatggacaagcttgttgttcacatcagcaagaacttcatgaccctgcccaacatcaaggttcctctcattcttggtatctggggaggcaaaggtcaaggaaaatccttccaatgcgagcttgtctttgccaagatgggaatcaaccctatcatgatgagtgctggagagttggaaagtggaaatgcaggagagcc

SEQ ID NO: 21343 - DNA, 328 bp, Glycine max
  Clone ID: 700763718H1
cgtgagtgtggtggatgccgaaaacctaatcagaaaaaaaatcgtagttggaggcgccgcactccactccactccaatcaatcagatactagcgatggggaggaagcgaaaggtagcaccgaaatcttctgtatccgccgagcccccgctgaagcaacaccaaccaaaacccgaaaatgccgctcaggaatacgaagaagaggtcgaagaggaagttgaggaagaagaggtagaggaagaggtcgaagaggaagaagaagaagaggaggacaaagaagtgaacgctcctccaaccacaaagagtgacactgaagtttcattttcatct

SEQ ID NO: 21344 - DNA, 320 bp, Glycine max
  Clone ID: 700763719H1
cttcgccgtttcagctgaagagccatccgcagtaagcaatggttaagcataataatgttatccccaatgggcacttccggaaacactggcaaaactatgtgaagacttggtttaatcaaccagcccgaaagaccagaagacggttggctcggcagaagaaggctgtcaagattttccccaggcctactgctggatctctcaggcctattgttcatggccagactctgaaatacaacatgaaagtcagagccgggagaggattttcactggaagaattgaaggctgcaggaattcccaagaaacttgctccaactattggg

SEQ ID NO: 21345 - DNA, 319 bp, Glycine max
  Clone ID: 700763721H1
aggacaatccgtctaccggagaaggtatttatcctattgggcaaggtaatggaggctaagaaattgtacattcaggaaggaaaccttcacccaactaaagaagaattagcaagaagggtaggagttactgtagaaaagattgacaaattactattttctgcaagaattccaatttcaatgcagcaaactgtgtgggctgaccaaaatacaactttccaggagattactgcagaccccactgttgaggccacagatgtgactgtcgaaaaacagcttatgagaaggcatgttctcaatgtcctaagtgtcttacacccaa

SEQ ID NO: 21346 - DNA, 315 bp, Glycine max
  Clone ID: 700763722H1
gccacagtatgattccacttggatcttgtacaatgaagctgaatgcaacaactgaaatgatgcctgtgacatggcccagctttactgatattcacccttttgcaccagttgaccaggctcaaggttatcaggaaatgttcaataatttgggtgaactgttgtgcaccatcactgggtttgactccttctccttgcaaccaaatgctggtgctgctggagaatatgccggacttatggttattcgtgcatatcatttggcaaggggagaccaccaccgcaatgtttgcattatacctgtttccgcacatggtacaa

SEQ ID NO: 21347 - DNA, 317 bp, Glycine max
  Clone ID: 700763723H1
gctaaagataggtcaaatccaacgctttcttcaacatacatatctcaattatgtagcattagcatacccttttttattctttcttctatttctctgcagtgctcaagccttcctagctcccttccttggctcaaaagattttcccttgattttgccaatttggtgcatatctgcttcgttttgctttctgtgtcttcaagtcttacttggaagggtcagatttgctgcaaatctctccatttccccatcatcagaaggtaaaatttcttggtttactctatagctacttgaaagaagtcaataaaagagataatggt

SEQ ID NO: 21348 - DNA, 314 bp, Glycine max
  Clone ID: 700763724H1
atcgccggcggcaccctccgaagacggagatacacccactcacaaccactttcccggaaaataaccaccgaccacaatttcttggaatttattttgcggtgaattcactttctgcctttaattttttcatcccctcgcgtgcggattttgttttccccttccgccgatagggttttgatgattttaattttgttgatttggaaggatgtggaaacttaaaatgcgactgctttttgattttttttaaattgttgatgctgacctacgacctgcagttttggtgcctttgttgttcggattttcaggtgagggag

SEQ ID NO: 21349 - DNA, 311 bp, Glycine max
  Clone ID: 700763725H1
ctgctcaagacgatttctggcccctcgaccaaaacttcaccacggtagaccgaccagggtccaagtctctttgagtctaccgagactcagctttcagtcacgtcaagtcagactggacagctcaacatcaccatgtcattgatcagttacttcagcgcggtcctgcccggtctttctgagcacgtaaattgcggctttgcctatcaccctctgctttcgccgcagcttggagagaaatccgttgacatggcgtgatgatactccttaccactaacgcggccagatctacacatctatagctcacctacagc

SEQ ID NO: 21350 - DNA, 311 bp, Glycine max
  Clone ID: 700763726H1
ggcattagtgaagttggctgaagatgcagtgagtaccaagaaggcggagaaaaaggatattgttggtttacaggagcaggtttttgttcggaaggtgattgagctgcatgacaagtacctggcatatgtgaatgattgtttccaaaatcatacactttttcacaaggctcttaaggaggcttttgagatcttttgcaacaagggtgtcgctggaagctcaagtgcagaactgcttgccactttttgtgacaatattcttaagaaaggaggaagtgaaaaattgagtgatgaagcaattgaagaaactcttg

SEQ ID NO: 21351 - DNA, 310 bp, Glycine max
  Clone ID: 700763727H1
gggcagtgaccctgaaaaccctgaagcaacaatagagagactagcaagtgatgatgatacatttgctgggactagcttgtaggatcatgagtgatccatctgtaggttcccttacgtttgtcagggtgtatgctggaaagctaggtgctgggtcttatgtactcaatgcaaacaaagggaaaaaggagagaattggtagacttttagaaatgcatgcaaacagcagagatgatgttaaagtggctttagctggtgatattattgctcttgcaggtttgatagatactattacaggtgaaacattgtgtga

SEQ ID NO: 21352 - DNA, 311 bp, Glycine max
  unsure at all n locations
  Clone ID: 700763728H1
gttaagatctgtggtttggttttcgggaggaaacaaaaagaggaaaaatgaatagctacagctactatgggtaccaagagaagaacaccttgacaaactgtgaggagacgaacatggaatcagtgatttgccccaaacctcgccgattgggtctcataaaccactcttccatcaacacgcaaatcagaccctcaaggcacccaatcatcagcttccaatctgaggtggaagattcaggagttggggcagagcttctggacatcatcctccccaaganaattgctatctggacagatctggaggccagtggt

SEQ ID NO: 21353 - DNA, 320 bp, Glycine max
  Clone ID: 700763704H1
ttgctttctttactggtgtaaaccatcatgggcaacctgttctctttggttgtgctttcctaattaacgaatctgaagcatcatttgtgtggcttttcaagacatggcttatggccatgtctggatgtccgccagtgtcaataacaactgatcatgattctgcaattcggtcagccataatacaagtcttccccgagactcgtcaccgtttctgcaagtggcacatctttaaaaaatgccaggagaagttatctcatattttcctccaatatccaaattttgaagcagaatttcacaaatgtgttaacttgactgagtcg

SEQ ID NO: 21354 - DNA, 335 bp, Glycine max
  Clone ID: 700763701H1
tgcgtgtgtttgtgaattgttgttgagatctgaatcacaatcagaaacgataatggctacaccggaccacctcttcaacctccgcaacaacttctacctcggcgcttaccaagccgccatcaacagcagcgacgttgccaacctctcccaagaagataccctcgagcgcgacaccctcgtccaccgctgctacatcgccctcggccagctccagttcgtcatctccgagatccacgacgatgctcccacaccactccaagccgtcaaactcctcgccctctatttctcctctcccgacaccaaggattccgccatcgcgagtctcaaggagtggc

SEQ ID NO: 21355 - DNA, 328 bp, Glycine max
  Clone ID: 700763702H1
ccatctttgccttctgcatgttggttctctgtaaacagatactgcaaaagaagaataatattgaatatttggttgggttgaatccctgggttgaagcgttgcagacatcacggctattctaagagtgtctcgctctctcattcatgtcccaactgtacgacggaggacaggttgcgtaactgccaccaacccttcgccgcacggtgggcgtggtgctttgccttctgaaggtggtagcccttcagacttgctcttcttagctggtggtggttctgctgtcttctagcttcttcttaactcttttttctttttactacttttaagctac

SEQ ID NO: 21356 - DNA, 325 bp, Glycine max
  Clone ID: 700763703H1
ttaagttataaaatcagggtaatgatccaccaacccgctagttctttttatgaggcacaaacgggagaatttatcctggaagcggaagagctactgaaaatgcgtgaaactatcacaagggtttatgtacaaagaacgggcaaacctttatgggttatatccgaagacatggaaagggatgtttttatgtcagcagcagaagcccaagcttacggaattgtagatcttgtagccgttgaataaaaaataagtggcaaggattattctaaaaaaatacaggatttgaaatttcatttttgaatcttcttactttcattttaatata

SEQ ID NO: 21357 - DNA, 1136 bp, Glycine max
  Clone ID: 701001443CPR9857
gaattcggctcgaggtcacaacttcagtgctatggtgaatcagtgtattgcacaggttcggacttgctaagcatgtgcaacaatggtcagagtccacttgataggttcatatctgtggtagcatggtgcatatctaccactcgccctgtgacttttggtgttgctccttataatcccattcttggtgagacacaccatgtttcaaggggaaatcttaatgtgttattggagcagatttcacatcaccctccagtaactgctctccatgcaacagatgagaaggaaaacattgaaatgttatggtgccagcgacctgatccaaagtttaatggcacatcagttgaagctaaagtgcatggaatacgccagttgaagctcctaaatcatggtgaaacatatgaaatgaattgtcctcgccttttacttagaattcttccagttcctggtgctgattgggctggtacagttaatatacggtgcctagagacaggtctagtagctgaattatcctacagatcaagttcttttctaggaattggggggaatcatagagtgatcaaagggaagatccttgactcttcatcattgaaagttctatatgaagttgatggtcattgggataggaccgtaaaagtgaaggacacaaataatgggaaagtaagagtgatatatgatgcaaaggaagttatgtcaggtctcgaaactcctatactcaaggacatagagggtgtgtggcaaacagaatcagctcatgtttggggtgaattaaaccaagccattgtgagcaaagactgggagaaagcaagagaagcaaagctaaaagttgaggaaagacaaagggagcttgtgagagaaagagaatcaaaaggagaaacatggatttctaagcattttgtagtttctaacaacaaagaagggtggcaatgttcacctattcataagagtgtacctgcggcccccatcacagccctataattgttgtcactgtcaagtagtgtaaagcattaaagtacattttagaagagaatgttcataaaaaaatttaatggttgaaattttgacaacaatgaagtatataacaaaatttaaaattagttacaattttaaaaaaaaaaaaaaaaaaagggcggccgccg

SEQ ID NO: 21358 - DNA, 225 bp, Glycine max
  unsure at all n locations
  Clone ID: 701096989H1
acgtcgcngcacgcgtacgtaagctcggaattcggctcgagtagttctagatcgcgaacggccgccgactagtgagctcgtcgacccgggaattaattccggaccggtacctgcaggcgtaccagctttccctatagtgagtcgtattagagcttggcgtaatcatggtcatagctgtttcctgtgtgaaattgttatccgctcacaattccacacaacatacga

SEQ ID NO: 21359 - DNA, 83 bp, Glycine max
  unsure at all n locations
  Clone ID: 701097144H1
gtcncangcacgcgtacgtaagctcgggaattcggctcganatcgcnagcngccgcccttntnttttnttttttaggtttttn

SEQ ID NO: 21360 - DNA, 221 bp, Glycine max
  unsure at all n locations
  Clone ID: 701097274H1
nacgtcgcangcacgcgtacgtnagctcgggaattccgagcttggatcctctagagcggccgccgactagtgagctcgtcgacccgggaattaattccggaccggtacctgcaggcgtaccagctttccctatagtgagtcgtattagagcttggcgtaatcatggtcaagctgtttcctgtgtgaaattgttatccgctcacaattccacacaacatacg

SEQ ID NO: 21361 - DNA, 328 bp, Glycine max
  unsure at all n locations
  Clone ID: 701097391H1
atncatangnnactaagctnngctcttcngntcgnnctcagancncgttggancagngatcttctnnnaannangactcnntgtntcangganacatcaantnccaganaaacnngaagatntgtcanttaccgattcaattcntagtcggnnataacatgntnggatncttnagantgggcnaattgacacacagcatcncanagggnnctnacnntnattgtggaaatggtnantcngcctagnnntgnatccancngangatgcnccttgtgnncttanatgagnancttcganncgctgncaggctcaatctctggtggcgctc

SEQ ID NO: 21362 - DNA, 327 bp, Glycine max
  unsure at all n locations
  Clone ID: 701097479H1
tcgcangcncgcgtacgnnngcncngnagtcngctcgagantcaagctgtctnnnacatctctcnctcccntcacacntgatatctattgatnnacntnnatggntanncgtatcagggttngacccaattgcngcaanaagcnatcgaangaaggtagnncgtggnctgntcctcngttatnatcttcctccannggcacggnnnccaaganccangtgtcagggnatatgnntaggtttnntcnagagtntagggnngtngtgncccccattnntntgnnncngatgaantccgntgnntnnngccatncgagttacggnccccn

SEQ ID NO: 21363 - DNA, 163 bp, Glycine max
  unsure at all n locations
  Clone ID: 701097692H1
acgtcgcangcacgcgtacgtnagctcggaattccggaccggttacctgcaggcgtaccagctttccctatagtgagtcgtattagagcttggcgtanatcatggtcatagctgtttccngtgtgaaatngtnatcccgctcacaattccacacnacatacgn

SEQ ID NO: 21364 - DNA, 208 bp, Glycine max
  unsure at all n locations
  Clone ID: 701097721H1
atnctangcacgcgtacgtatgctcggaattcggctcgagtctcanaagctnaanctcanacggnagtttaaaaanaanacaacggntnacgnnntntnnttctcaacatgatnnncgtgcntagnnncncgtcgngcacgggaatgnnnnnngatcgangccnaacgacgacgnttcggnnntcgaagggggcttttcnagatnngg

SEQ ID NO: 21365 - DNA, 225 bp, Glycine max
  unsure at all n locations
  Clone ID: 701097738H1
tncacaccnaanncagcgnangtaagctnggaattcggctcgagggctaatnntatnactancananntcacnncnctcaagnacgncagnnancncganncaatngntancgcnnatngatnacngnnntaccctnnagngnncncgcatggcangngaccnntcagannagnccnagccgtnacgnncgcgcanncacnnnannaccantccgancangcagn

SEQ ID NO: 21366 - DNA, 205 bp, Glycine max
  unsure at all n locations
  Clone ID: 701097759H1
nctnntncatagtncgcaggcgtangtcagctcggtattcggctcnagcgctnacctcngntgcngngatgattgnntnnntgactanagnttctcctgtnttctcagctgtggnntnangctnnaggtnttatactgcagagtatatnggtcgnacggcgtntcncnctgctngcaggcgntcnacntggccncgctcntgncn

SEQ ID NO: 21367 - DNA, 211 bp, Glycine max
  unsure at all n locations
  Clone ID: 701097779H1
antacattttaagttgnnannangcgtacgtaagctcgngaattcggctcgagagtctccantnnatnntacnaancnggttacnnagntgccgacaagttgctgtccttntggnacntnngnngancangngnctttgcacaagattatgccanatantnntntcngtcnanatanngncaccgtngaagncgncatcgcncatantgtt

SEQ ID NO: 21368 - DNA, 195 bp, Glycine max
  unsure at all n locations
  Clone ID: 701097786H1
aaananaagagnagaaggnangcgnacgtaagnacggaatnggnnngagaaantatnatcccagtgacagcaacangcagnngcacanaacagangannanannnannnngaaggngnngnnggnnnnnagaanngnagangnnagagnnggaggaggnngannganagnngnaagaaaaannnggggngnggaa

SEQ ID NO: 21369 - DNA, 213 bp, Glycine max
  unsure at all n locations
  Clone ID: 701097787H1
gcngncganncnangtcgcnngcaggcgtacgtaagctcgganttcggcnacgagntcgtctntganncntacgcangagtncgagnnttatgntntcnnggattncgnancagnncagnngatcnntnncgntnggncaatnngatnnagtgcannangngcnnnanctcngngnncnaagggcncngangtgcantgnntngganggangn

SEQ ID NO: 21370 - DNA, 251 bp, Glycine max
  unsure at all n locations
  Clone ID: 701097811H1
nnngcgtaggcnanctcngnntncggctcganngtgggnactancncngtnaannnggntgncatntctgtntganngttcatntaagtncagcatacggacacacncacaggacgangcagntnanccanangnnncnggnngngnacagnnacannanaangcnaacagancgtnnnatcatnaaagagnnnnacaanaacacncgannnnatntaacaangacgcaaaagtannnctgaatantcngt

SEQ ID NO: 21371 - DNA, 239 bp, Glycine max
  unsure at all n locations
  Clone ID: 701097817H1
ttttnanngtataancgtanntaagctcggnatnngncttnaancagtaanncaataganccntnannccantgnataccnnnntcnctctcgtccaaattccattaatagnttnncatagaacttcaatgnnttnncaatgtncnnantatnngnanattnnnntaattnnngagnntcnaacttnanananactcgttctantatcagaanattgannctcannaanannttngnnt

SEQ ID NO: 21372 - DNA, 128 bp, Glycine max
  unsure at all n locations
  Clone ID: 701097820H1
gcgcggcgcaagngnancgtagagacacgcgaactcgagggcgcnantatgganngcnnagnagngacgaacancgncccanacgcggtngncaacggcaggatgcngangnaggngacccggcaann

SEQ ID NO: 21373 - DNA, 237 bp, Glycine max
  unsure at all n locations
  Clone ID: 701097826H1
cncgcgtacgtnagctcggaattcggctcnagcggtannncannannngggcngannannaannctnnannattaattaaangggctctncatnaccccaaagcgaganggggnttcttanattcaacatngctaccnancncnnnacatnntacancctcnatcnnaaagcgtnnanacnaagacnctgcttcccngnggcccccanaagaacccnnaaaggtccnncaggccnac

SEQ ID NO: 21374 - DNA, 184 bp, Glycine max
  unsure at all n locations
  Clone ID: 701097830H1
gnnggcacgcgnacgtaagcacgcgcaancggcacnancaaccacggcaagacaaaangcacaaacccaancccnnaaanacnacaanacaccaancagcganacacggccncaaanaacaacnnnacaccagcancncaanaggancncaacnacnccaaacnaaccanncagaaaagaaacc

SEQ ID NO: 21375 - DNA, 237 bp, Glycine max
  unsure at all n locations
  Clone ID: 701097856H1
ncatgcacgcgtacgtaanctcggaattcggntcnaagtnnnatnaaaaaaggttncnnnngtggaaatnntcaaccgncaccggnnnaantttnnangatttggncacaagagtgccatgggcnaaantactgtcctannaccantcgngcgnatgtatgcaggttccccctggtttccaaaggccttncatttccngcggctnaagccaacactgtgtggnattgctttctcccc

SEQ ID NO: 21376 - DNA, 237 bp, Glycine max
  unsure at all n locations
  Clone ID: 701097874H1
tcgcaggcacgcgtacgtaanctccnnatncgagctcgagggcacaacgcagtnngtnaccnccgncantannnannaangnncttacantngccnanagaacangcagnncgcagggnancnnnnctcntgtagtagnacnaagancncncacctnnacncatnagcccaggngancagngacaactgcnanncagagncaccactntaacgcccaagcacattgnatgttggtga

SEQ ID NO: 21377 - DNA, 292 bp, Glycine max
  unsure at all n locations
  Clone ID: 701097891H1
tnngtacgcnanctcgganatcggatagcanngncncnaganaggcannntcgtactnnnnagaangatnctgnagttgtnatncgnnggnnancaaccttcaantgcaattgactaccgnnacangcaacangcncagcnaatggntgnnncntatncnnnnaaacnggcnaangtttgcncnagcanaggcattcgntgcgcantgcanancantannagaccgaggnnnntnnggncganacaccaagagngnggngaaaagnntttnancccngtgatnnnacntncn

SEQ ID NO: 21378 - DNA, 175 bp, Glycine max
  unsure at all n locations
  Clone ID: 701097918H1
tcangngtnacttnagntcgggccgactattgagctcgtcgacccgggaattaattccggaccggtacctgcaggcgtaccagctttccctatagtgagtcgtattagagcttggcgtaatcatggtcatagctgtttcctgtgtgaaattgttatccgctcacaattccacaca

SEQ ID NO: 21379 - DNA, 86 bp, Glycine max
  unsure at all n locations
  Clone ID: 701097938H1
tcgcatgcacgcgtacgtnagctcggaattcggctcgagggacactctctctcannaaagncttnctaganggnanaaaaaaancc

SEQ ID NO: 21380 - DNA, 303 bp, Glycine max
  unsure at all n locations
  Clone ID: 701098078H1
ncgcgggacgngtacgtnagctcggaattcgggnacgagctcagattnaagagagtgannnagtgattnccaaatcnanagnctcanantcccaattagnagaanccnnangnngngcatatcnnttggtanaggngnggtttccaatatgggttatgccngtgntcaggacatggaacccgntaatagtgacatggacttatcctaatggtnngaacagggncacaanttncggcnaactccnagtgattgcatggattgcntatnagatagtnctggtcntgattttncatnctgatggtg

SEQ ID NO: 21381 - DNA, 215 bp, Glycine max
  unsure at all n locations
  Clone ID: 701098113H1
cgcanncacncgtacgtnagctcggaattccgagcttgncctcctctagagcggccgccgactagtgagctcgtcgacccgggaattaattccggaccggtacctgcaggcgtaccagctttccctatagtgagtcgnattagagcttggcgtaatcatggtcatagctgtttcctgtgtgaaatngttatccgctcacaattccacacaacata

SEQ ID NO: 21382 - DNA, 301 bp, Glycine max
  unsure at all n locations
  Clone ID: 701098137H1
gntaangcanncgtacgtaagctcggaatcggccaacgcgcggggagaggcngtttgcgtattgggngctcttcngcttcctcgatcactncactcgntgngctcggtccgttcggctgnggcgagcggtatcagctcactcaaaggcggtaatacggttatccacagaananacgangngagcnggaaagaacatgtgagcaaaaggccagcaaaaggccagganccgtaaaaaggccgcgttnctggcgttttccataggtcaacacaacatacgacgngannnnncnnnnnaanccnn

SEQ ID NO: 21383 - DNA, 406 bp, Glycine max
  unsure at all n locations
  Clone ID: 701098254H1
ccntncnnnnnnnnccctttnntnntcctnnnnnntcacccnnanccttnnctatcnnctnnnnnatataatntntnnntcncttncnnncnnnntnannnctcnnccccnttnnttctctncnncncnnntnnnctnacnntctcnnnctcannncnacnntntatctcannnncaccnttcatacnttatttntaattnctnnccnnntctccannctcannnttnancannntcttnnnntacaccctntcatntntnttntnnnnnnttcanntctnnantctgtccnctnnccntnnactctccnccctttcnnncacctctcacanntntcntnccnnntacacnntntnntnctnnactcntncncnttncctncnnccnncnnannnntnnnntnncc

SEQ ID NO: 21384 - DNA, 70 bp, Glycine max
  unsure at all n locations
  Clone ID: 701098393H1
gtcgcangcacgcgtacgtaagctcggaattcggctcgnncacaaaaccctttcccaaaaaaataaaaat

SEQ ID NO: 21385 - DNA, 188 bp, Glycine max
  unsure at all n locations
  Clone ID: 701098430H1
tcgcangcacgcngacgtnagctcgggccgactagtgagcncgtcgacccgggaattaattccggaccggtacctgcaggcgtaccagctttccctatagtgagtcgtattagagcttggcgtaatcatggtcatagctgtttcctgtgtgaaattgtnatccgctcacaantccacacaananacgt

SEQ ID NO: 21386 - DNA, 186 bp, Glycine max
  unsure at all n locations
  Clone ID: 701099041H1
gtcgcangcacgcgtacgtaagctcgggccgactagtgagctcgtcgacccgggaattaattccggaccggtacctgcaggcgtaccagctttcccnatagtgagtcgnattagagcttggcgtaatcatggtcatagctgtttcctgtgtgaaatngttatccgctcacaattccacacaacata

SEQ ID NO: 21387 - DNA, 313 bp, Glycine max
  unsure at all n locations
  Clone ID: 701099271H1
gaatttngtnaacgtntaggnagcgaggacttaggctnnagnaaacngaacncnnactgangtntagagggangaanaggannnctnagcagncnngcatantgagttangagngnanggtgcanacannnnaanangaggaggnnngncgtagnanggngnantnnnanncnngnnagaagnnggacannggggancangctgtnnagnagntagcngaccgnnagnngatagnnatgttggagnagnaanagnnatttnggganaagatngnannnnannnggtagtatannntnnngtagnngnnntgnc

SEQ ID NO: 21388 - DNA, 128 bp, Glycine max
  unsure at all n locations
  Clone ID: 701099485H1
cgtcgcangcacgcgtacgtaagctcggaattcggctcgagnaggctttgtcattgggancgtcaactgttatnangggnancntcntagctcggnantcttgagggcccctggngcctnngtgcnat

SEQ ID NO: 21389 - DNA, 291 bp, Glycine max
  unsure at all n locations
  Clone ID: 701099620H1
ngnatgnatngnacgnaagctcgnaattcggctcgagctaaancntcgcnntgtnagtnaannngagnnatagacntttntnctcntgaaaangcnnngncngtctttggntacataanactctnaaatnattccatgtggggaaactggaatcggattactgttnantcatcggggntttnaacctnanggaaatgtcgcnggacattttaanggtggnggccaaanggnantaantctnnnccccagtaaagatgcncccatnnttgctgntngggttaanaancanna

SEQ ID NO: 21390 - DNA, 323 bp, Glycine max
  unsure at all n locations
  Clone ID: 701099629H1
tcgcgcgnacncgtacgtaagctcggnattncngctcgagcncgcagtcgtggagatgccagatgtttnatggtnttgntnagnagnacacnaaggnttggtgaacgcncatgtgttnatnattannnctnannngnaanttntttcnannnnagcngctagcancgccatntnagagnnaaacgnacggtngcaaanncnanngtttggnggnngcnnctcnnngnntngtcnntgcacntcganaggatgacanngaacnaacnntggnnactntncnnaannnganaccatgnaangcngacannggcaancanctttnn

SEQ ID NO: 21391 - DNA, 146 bp, Glycine max
  unsure at all n locations
  Clone ID: 701099851H1
ncgtcgcnngcnncgcgtacgtncgctncggnnnttcgcgcctcgcngcttngnaganttgnanctgcncattattgtaagtacngnnttgggaanggncaggacnngcgcatgnatnctcccctcatacatagatctgtacctcc

SEQ ID NO: 21392 - DNA, 301 bp, Glycine max
  unsure at all n locations
  Clone ID: 701099881H1
nangggnngncnnncgaatgtaagcncggnanncggcttgagngntnnccgcnnnantanaggacatactntgcgnnntccnngntttgaaaaanagcntcaatggggnngtccnccaatncgtaggtttcntacgaatcttcttngaagnngnaanggaggnggncnccgccgncgtcgccaannacgagatcgaagncgncnacgaggagctcgaagnggtggcacgcnacgtcagctccgacgacgacganaatncgccggagnagcgnngaagnnnnganagnanaccggagnngga

SEQ ID NO: 21393 - DNA, 171 bp, Glycine max
  unsure at all n locations
  Clone ID: 701099904H1
gtcgcangcacgcgtacgtnagctcggnnttccggaccggnacctgcaggcgtaccagctttccctatagtgagtcgnattagagcttggcgtaatcatggtcatagctgtttccngtgtgaaatngttatccgctcacaattccacacnacatacnnagnntcanaaaaa

SEQ ID NO: 21394 - DNA, 204 bp, Glycine max
  unsure at all n locations
  Clone ID: 701099915H1
aacggcngcacgcgtacgtnagcncgggccgactagtgagctcgtcgacccgggaattaattccggaccggtacctgcaggcgtaccagctttccctatagtgagtcgtattagagcttggcgtaatcatggtcatagctgtttcctgtgtgaaattgttatccgctcacaattccacacnacatanncgnntcaaanaaaaaa

SEQ ID NO: 21395 - DNA, 215 bp, Glycine max
  unsure at all n locations
  Clone ID: 701100311H1
gtcnangcacgcgtatataagctcggaattccgagcttgngatcctctagagcggccgccgactagtgagctcgtcgacccgggaattaattccggaccggtacctgcaggcgtaccagctttccctatagtgagtcgtattagagcttggcgtaatcatggtcatagctgtttcctgtgtgaaattgttatccgctcacaattccacacaacat

SEQ ID NO: 21396 - DNA, 57 bp, Glycine max
  unsure at all n locations
  Clone ID: 701100459H1
cangncgcgtncgtcagctcggnattcggctcgagccancaaanaaaanaaaaaana

SEQ ID NO: 21397 - DNA, 103 bp, Glycine max
  unsure at all n locations
  Clone ID: 701100689H1
nntcntnttnncgtcgcantgcacgcgtacgtaagctcggaattcggctcgagcnaaaaaaaaaaaaaaaaaaaaaaaaaaaaaaaanaaaaaaaaaaaaaan

SEQ ID NO: 21398 - DNA, 205 bp, Glycine max
  unsure at all n locations
  Clone ID: 701101124H1
cnctaanaagacgcgtgcatgagcncgnaattcgggctnganngaggtngntncttnngaacacgtcctgcggatngatccaatcctccngnnccgacatngatggaccngannggaaaacgantncaaagccnctctncgnntgcatcccgttgntccgacncagtcnncgnctacgacgagnctnnnttcatngattanggnc

SEQ ID NO: 21399 - DNA, 161 bp, Glycine max
  unsure at all n locations
  Clone ID: 701101171H1
agttgangnagngnacgtnagnncggaattaggcgnnagaagatnnnnngtgngtgannnatgnngatgattctgggnngtctnnacatncnntnnnggatgganggggttanggtgagangnggggtaanagnattggngnannngggtngnagagnggn

SEQ ID NO: 21400 - DNA, 206 bp, Glycine max
  unsure at all n locations
  Clone ID: 701101176H1
ccntaaatncacgnnacacacgcanggacntcggnacgagnggcanganatatgancattngcacgnccacggcanangaaggtgcntcannncatatacaatccagcnanccggnaacatnacgcaagaacggcnanancgtcatcgaaggaagncacngnnaggtncnnggcagtttcnacntaccananncnggnaanatcgg

SEQ ID NO: 21401 - DNA, 264 bp, Glycine max
  unsure at all n locations
  Clone ID: 701101205H1
gancannttaggncactggntnngcgccnagaagtnancncagnccagcnacacacnnacagnnacnaaaacngnaccanaaaatnngancganncaatgnannaanncaanaacnagagcnganggccaagcacgnngnnccgtgtgtcggncggtcnanngnanaggncnntnanaggagtanngcncccnancanngggnagcggacagnccaagncnangaggnagaacgcggaancggganntgggngangccagccnn

SEQ ID NO: 21402 - DNA, 284 bp, Glycine max
  unsure at all n locations
  Clone ID: 701101206H1
angnaaatacgannagnnagantggnancntggaannaangtagaanngnnngcagaangnnatnntanagagnacatggaaatgngatcanggtngaaaaaaggtgncagcanagtnnagatgaaagcagntangaggtagtnggcnntgnnnagagngaagagatngatgngnangtttgnnnagngtagnaananggtgttngnanngggtagaganaannagcngcaggaatcagagancnnaggnangacganangnnntagagganncagnnagcana

SEQ ID NO: 21403 - DNA, 267 bp, Glycine max
  unsure at all n locations
  Clone ID: 701101207H1
tnnttgnaattaggannggtaaacagnngcacncgtgnanangagngtgangnanntganntanacntcactntgnntcngttcagnanacaagttgancttngctcngnccanangncgnnnntngcanacnncnggantacacagcgntatgtccaacnngnngtcntcnnnacgnantggatcttncatncnagctncaaaagnctnctnnaatgngtcanntntncngnncacggagnggncgntgtnccgtcngtngtaatt

SEQ ID NO: 21404 - DNA, 302 bp, Glycine max
  unsure at all n locations
  Clone ID: 701101208H1
gggtngaaatangctacgcnaagngngggncanacnngnctgtncangatggncgngntgaaannngctanacantacagtagncnntngtnnancacgggngnnaatnnggnactgcaagnncntgtncgtgacgnancanattgnacncnnacntgtnntttncatcaggncncncacangtgtgcncngtgatnnnngcnacatanaannatntganannanngagnngnnagnnannggnntcggnggnantcanggtnnccngtnatntgncggcgntacnnnngtgagctnatgtn

SEQ ID NO: 21405 - DNA, 155 bp, Glycine max
  unsure at all n locations
  Clone ID: 701101217H1
cngcacgcgtacgtnagctcggannncggcncgcggtnccannanacnngcncgacnngcncnccnnattgncaacnnggcncttncnaagncgctaagnntnaatcgggcanntntncggnnatgnntcnnncnancntgtnatngnngagang

SEQ ID NO: 21406 - DNA, 241 bp, Glycine max
  unsure at all n locations
  Clone ID: 701101219H1
cccncncnnccccnncnccncncnncnncnccnnccncncncccncnnncncncnncncnnccnccccncnncccncccctccnncncnncnncnccccncntnnnnnccnctnctnncnccccccnncccnnctccntcccnncnnnncncccnnncccnncnccnncncccntccccncncnncntnnnnccccccnnnnnnncnnccnnccnnnccccnnnncccnccnnnnnncncn

SEQ ID NO: 21407 - DNA, 201 bp, Glycine max
  unsure at all n locations
  Clone ID: 701101222H1
cctcncnccagacntnacnngncgngngcananacatccncntccnaacacatganntgtatnananntnntnnnnaccancacacgnnctgcatcgncncacnnntgnancccantncnnaccatcagngnagatngnannagggncnaannagacancaggngngagtaccgggcannaaagnatnngacaannttntn

SEQ ID NO: 21408 - DNA, 328 bp, Glycine max
  unsure at all n locations
  Clone ID: 701101289H1
tgatnaaaaantagcgacnnnatgtgcatngattgtgntgtnnnggnacagtgatnantncgcggangnaagcangngnaccnaccanntantggatntnatcagngntanggtngtgangnnngcangtggtcttaacatagtcanctctncnngtcatgcnncagnnngcttcngtngtacnatnngnnagnantcacaatngntnggtgcttnatgcnngnncnantnnncanacncnaagntnagaggtgtggtcctnnttannattgatcngcgcctgnnatatntaattgtcngtnaggtatagctgacnnntnnttgcntt

SEQ ID NO: 21409 - DNA, 345 bp, Glycine max
  unsure at all n locations
  Clone ID: 701101290H1
tgtatnnaaatnnannnnacctangtnnagaannnagtgacnanacnnanngnnacccacagncactnacangtnacacgtacagagngntnatgttcagnagtccnntgntannncacganaccanngnanntctnngcncgtgnanaggagcgcgntnctnngantaagnngangccnagatngnnggngnnnannnnncagtaangnananacgcncnatngannagcantgnagnnncatgaancgntgtcnntatcnagagncnngagngncaaganacantatactannagatntgcgantngtgngtctaannnnggngannctatggncangnntnc

SEQ ID NO: 21410 - DNA, 269 bp, Glycine max
  unsure at all n locations
  Clone ID: 701101291H1
agatnnaanctcgnctccgcgnntccngaccngnagnnatttacgtgacgtttgncacngntgtacngnncncgcacntcaatcaggtncancnnnngnntngancnncanagncgctttncanacccagnntnagnnatgngnngnntntnntnnntanngcgttnacngacangggcaannnggtnntnngtnngnngangggntnttngccccagnnnnnnncgaanngnnaanttgtngaantngagnantnganntcnntannn

SEQ ID NO: 21411 - DNA, 274 bp, Glycine max
  unsure at all n locations
  Clone ID: 701101292H1
tctaatntnngactacaangnnctgcgggccncagtntntnnnncgnnttgtnnnncngtgngtgangttncnccngtcgnnngatnagtcnntgncacgngtnnnngcncnnnnntgagtacnaggagnnggngnncnntaccancntcngangngtaccgcccaacntnngnntanngcancnntggttannncntggncatntnngtgnnnngccatgnttnnnataagcnatcatncacnaatcaaccnnnnnnngngcnagtcnnacnn

SEQ ID NO: 21412 - DNA, 315 bp, Glycine max
  unsure at all n locations
  Clone ID: 701101293H1
gatntcaaatctacggctnnatntnncccccggaccccaacncatagtacagtgncncanncannanatntnatcgccntggtangnannngcacnnagncncnncttgtnnacantcancacnatcnntncgtnntcgatngntccnctcgacacanncagnnnnngnngnnnnngcacncgcagannngggntcnncangtttcacngcntgnncnncancntncacactcagtgnaanacacanggncngctcggtnnnnagnccntcnnccnngnntnacagnntgnngncnngtcgcgntngtgtgnngn

SEQ ID NO: 21413 - DNA, 424 bp, Glycine max
  unsure at all n locations
  Clone ID: 701101294H1
actnnacncacatnntcnaccnccagactcncgnctcacggacncgacacnanacnacgantnnatgnnctgagccgatacncncgacgcacnggngnagtgatncnnngnnannnnacgacgcacnnngngnnntcacntgcngtngnncgngcngnnacnccacgtnncnctacngttgannnacgcnngngacgacacacanancantncacagncantgtacgnngtcnacnactacgcngnctccanntcnnngngnntgtngangaccanacnnngnntacnctcangagttnnggnnagnctacntgcncngcgnannntnatntnagctgncgnannnatgtncntgagnaccgtgctctnnntnnnnnagnagngnctcgcncnanacncnannnnngnnatcgngntgntnntc

SEQ ID NO: 21414 - DNA, 318 bp, Glycine max
  unsure at all n locations
  Clone ID: 701101295H1
nncaaannctncnnccacaggagngnacaggccccacngacagnggnannngntnacanngangtncantnnaccacncnnannagngagnnnncacgnaggcacagacancgngagagaananncngacacaggnnnccnnatacggnngtangnnagtngaggannaanngccannacagacgaannancncnnacnagcaacannagancanannannaagcntnctcccannngatcaggncncanaggacngagnncanaagaccaagaggagnnnnnaagagacggcngagngcnnnanaagangtgnantt

SEQ ID NO: 21415 - DNA, 232 bp, Glycine max
  unsure at all n locations
  Clone ID: 701101321H1
nagnatannccccatccttannctactgancccttatccaaanaaccttggcnccgtttctggtaccaaattcattgntgataanatntnggnngnnnatcgaaatncggtttgccggttgangagnaagagcgtgctcagantggtgacgnaacatatgcngcncttcagtntctgagaatgnnccnacagacaagacgcttttggagnagancaattnangnnngnacnc

SEQ ID NO: 21416 - DNA, 295 bp, Glycine max
  unsure at all n locations
  Clone ID: 701101325H1
cncgcacgcgtacgtaagctcggaattcggctcgagagctattagagcccttgtaggcttctaaagttctctcttccagattaaaaaaaaaaaaaangggnggccgccgactagngancncgncgncccgggaattanttcnggncnggnacctgnnggngnaccagnttnccctatngggagtcgtattanngctnggggtaaccanggncatagctgttcccngngggaaattgttatcngntcananttccncanaanaaaangnnnnnaaaaaaaaaaaanaaaaagncnn

SEQ ID NO: 21417 - DNA, 276 bp, Glycine max
  unsure at all n locations
  Clone ID: 701101405H1
nanncacangnangnnagctcgannntcgncancancntcnannncatcnngnngtngcngagngaantncccnaanccngcancgactnngnnattctattgcnnncacgtaanncnctnagtgnttngaccctnactnnnnnngccggnacntacnnatannntcntccnantncngtgctnatattcnaggntngnnnnggaanctcncnntcttgatncnggnccctgtntgcatnncaagattaanntgctcnccaancnatnagcgnctn

SEQ ID NO: 21418 - DNA, 277 bp, Glycine max
  unsure at all n locations
  Clone ID: 701101441H1
tctanggtncgtangtnagctcggnattcggcncgngattnaattgattatntttaattataattgattnngtnnntcttngntaaatntgggntntnntatncatcnnggaatgngattacactgngnangtgaagaagatagntccncactcggaanaggcncgagccaaagatnangaagcngtngagaanaggcnanagnncnttgagaattacacggncaggaaggtnctgctggggcagancnacgnngcnatggcaacnntngctgnanc

SEQ ID NO: 21419 - DNA, 283 bp, Glycine max
  unsure at all n locations
  Clone ID: 701101466H1
atgtacgagtangtagagatggngnattcggaatngnnngnttntgatnggtttttgctgnaatatcnatananaatgcgtntnctnatncntgnntgcatnnagttgatcgnntngancanntnnttgntgagtnngaataatnctatnnaggggagaaagganntttatcaaanntngnngcatggagtanntnaaggtntnnnnggntagtctanaggggnataagcntgcacntntggngnataaatcnttnataagggtagtcanctgntacatggct

SEQ ID NO: 21420 - DNA, 312 bp, Glycine max
  unsure at all n locations
  Clone ID: 701102032H1
ngcnngcacncgtacgcgtacgtaagctcgagaattcgagncngganctgcaccnancagangntggagcntnacacgatgggcncctacaaatatggnntcagaagnnannggcgaaagnnagcngtacngctgtcangcgacntacttgcagagggtgnngtgctgcagantaanagncanaaaactnncattnnnctgatgcngnnantccgacccgncctgagcaaggctcgtcgcttgngctncaaggctanacagngcnatgcgctaagncnnnttaaaattcnnnccgagnttgggnnngcngac

SEQ ID NO: 21421 - DNA, 214 bp, Glycine max
  unsure at all n locations
  Clone ID: 701102123H1
cgcangcacgcgtacgtaagctcggaattccgagcttgggatcctctagagcggccgccgactagtgagctcgtcgacccgggaattaattccggaccggtacctgcaggcgtaccagctttccctatagtgagtcgtattagagcttggcgtaatcatggtcatagctgtttcctgtgtgaaattgttatccgctcacaattccacacaacat

SEQ ID NO: 21422 - DNA, 217 bp, Glycine max
  unsure at all n locations
  Clone ID: 701102292H1
acgtcgcangcacgcgtacgtaagctcgggaattccgagcttggatcctctagagcggccgccgactagtgagctcgtcgaccanggaattaattccggaccggtacctgcaggcgtaccagctttccctatagtgagtcgnattagagcttggcgtaatcatggtctagctgtntcctgtgtgaaattgttatccgctcacaattccacacaacat

SEQ ID NO: 21423 - DNA, 217 bp, Glycine max
  unsure at all n locations
  Clone ID: 701102501H1
agtcgcangcacgcgtacgtaagctcggaattnggctcgagctcgagcnganangtggataggnncaggncnnnnncnnnnacnnnnncnnnctngnggggggangcgnggnanngannggaanngnggnnnnnannngaggaaganagnngggagnngngnggnnnganngnannnnaggggganncagggnnnngngnggggngnnngnnggaan

SEQ ID NO: 21424 - DNA, 207 bp, Glycine max
  unsure at all n locations
  Clone ID: 701102581H1
ngttggngtncgcgtacgtaagctcggaattcngctcnagngattagccatggncnttnaatggagaananntggnnnngtaangtgctaanggnaatcnntgnncgctangtggtacagatgcntcggggnnatgntgntgntggtnacgttaaanatgcaactnttntaggattgcngagcaatgntngtggtaanatatgaagt

SEQ ID NO: 21425 - DNA, 278 bp, Glycine max
  unsure at all n locations
  Clone ID: 701102668H1
nccgtcgcatgcncgcgtacgtncagctcgganttcggctcgagnagtnncacancnnnnnnntactttncnttaanttnaagccacagccntnnttanctttgtntgataattcttgccnttagcntggannannttctcngaattgnanatcgcgcanacgcacaggatctgaagtcgnagcgtnncgtgcggcatattgtggtggtnacggttgtacgccgaacttanatgcccgngaggtccccgtcaganggggcgntgnacgcnntgcannc

SEQ ID NO: 21426 - DNA, 386 bp, Glycine max
  unsure at all n locations
  Clone ID: 701102687H1
aaaaaagntgnttgannagnaagtanaaanagancggattaaangggttaaaaagnnnttaanngngggaaaaaaannacgggggaaaataagggaangaatgaaanttngtantngaaanagnaatgnactntnnagcactatnaaagaaannagctaanaatgnnannnnaannngatannanaagcgngatangganangatagnagagagnaaaangaaagnatancnncngnatnnnnanggagntanggggagnnngaagagatacgantanagngaangananggggnggnnacnnaagtagnanttagngaggaannnaaannaanaanggtngtggntgganggannangtgaangnanntaaggnaagaggtaagt

SEQ ID NO: 21427 - DNA, 303 bp, Glycine max
  unsure at all n locations
  Clone ID: 701102826H1
atgngtatgtaagntcggnattcgaantngagtntntntntntctttntnaaaatnnttattttaaggnnntnnatgtngtttnanagangaataatntgnnttanaantattgtgnaggttnatggntngagtnaatatggggatnaatnngnaatagaanataaaaaanggaaaaangtnatttagtntanaatgnnatnnatnttgnaaatannnanntgagttananatgnannttaattgatattganntntantattnttgaagntanatnnnttaannantnannattnggnanga

SEQ ID NO: 21428 - DNA, 215 bp, Glycine max
  unsure at all n locations
  Clone ID: 701103049H1
gtcgcangcacgcgtacgtaagctcggaattcggctcgagnacctagttctagatcgcgagcggccgccgactagtgagctcgtcgacccgggaattaattccggaccggtacctgcaggcgtaccagctttccctatagtgagtcgnattagagcttggcgtaatcatggtcatagctgtttcctgtgtgaaattgttatccgctcacaattcc

SEQ ID NO: 21429 - DNA, 235 bp, Glycine max
  unsure at all n locations
  Clone ID: 701103175H1
ttcggcatnggcaacggcggttaacggttaaaggctccggggaaatttcagggtttccggagnntnttnccnggttgccancaagcctntngaaaaccaacnaacccggccgtnttttcggggaggaagtacgcacngtccgnantattgnggnanagngacgcggngatggtcagancgncagagtagngtgancnaggnatncgatanagccgnancgncantgnctatccgn

SEQ ID NO: 21430 - DNA, 145 bp, Glycine max
  unsure at all n locations
  Clone ID: 701103284H1
nngtcncacgcacgcgtacgtnagctcggnattcggctcgagnngaaacagagcgagctagagagagngcgcaganaganannnacatagcagngacacgccagcgntnngcttcacacatgcggttaananttcccacgcatcc

SEQ ID NO: 21431 - DNA, 81 bp, Glycine max
  unsure at all n locations
  Clone ID: 701103403H1
cacgcacgcntacgtnagctcggaattcggctcgagcntgggaattttgcctganagataagatagtagtattttcaaaac

SEQ ID NO: 21432 - DNA, 163 bp, Glycine max
  Clone ID: 701102588H1
gtttctgaggaaaccaccactggagttaagaggctctatcagatgcaggcgaatgggactcttctcttccctgctattaatgtcaatgactctgtcaccaagagcaagtttgacaacttgtatgggtgccgtcactctctccctgatggtctcatgagggcta

SEQ ID NO: 21433 - DNA, 260 bp, Glycine max
  Clone ID: 701099104H1
gctgctttgagagagggtctgccactgaggaaatcagaacaagctcactacttggactgggctgtccatgccttcagaatcaccaatgttggtgtgcaggataccactcagatccacacccacatgtgctactccaacttcaacgacatcatccactccatcatcgacatggacgctgatgttatcaccattgagaactctcgctccgatgagaagctcctgtcagtcttccgtgaaggtgtgaagtatggtgctggaat

SEQ ID NO: 21434 - DNA, 213 bp, Glycine max
  Clone ID: 701102648H1
catttgggagttaggttctgcacgctctgcttccagcgagtgttctttcttcgtttcaacaccttaatttgcacacgctgcttcttcagcttgagaaatggcacaagaaacctttctattcacatctgaatctgtaaacgagggtcaccccgacaagctgtgcgaccagatctctgatgcagtgctcgatgcgtgccttgaacaggaccctga

SEQ ID NO: 21435 - DNA, 144 bp, Glycine max
  Clone ID: 701100827H1
tgaaacccctgagtacatgcccctcagccatgtccttgcaaccaaactcggtgctcgcctcaccgaggttaggaaaaatggtacctgtgcttggctgaggccagatggcaagacacaagtaactgttgagtactacaatgacaa

SEQ ID NO: 21436 - DNA, 259 bp, Glycine max
  Clone ID: 701100070H2
cgagccatttgggagttaggttctgcacgctctgcttccagcgagtgttctttcttcgtttcaacaccttaatttgcacacgctgcttcttcagcttgagaaatggcacaagaaacctttctattcacatctgaatctgtaaacgagggtcaccccgacaagctgtgcgaccagatctctgatgcagtgctcgatgcgtgccttgaacaggaccctgacagcaaggttgcctgtgagacatgcaccaagaccaacatgg

SEQ ID NO: 21437 - DNA, 253 bp, Glycine max
  Clone ID: 701097475H1
actggatcaagcatccgtgttcttgagcatatattcagggaagatgcctacttgtctaacctccctgtttccattataaactcttggtatcaacgagaaggttatattaagtcaatggctaacttaattcagaaagagcgccagagtttttcttaaccaaaagaggtaatgatatttttcagtgcccatggtgtacctgtcaagtacgttgagggagctggggatccataccgagaccaaatggaggagtgca

SEQ ID NO: 21438 - DNA, 275 bp, Glycine max
  Clone ID: 701102766H1
ttaattcagaaagagctccagagtttttctgaaccaaaagaggtaatgatatttttcagtgcccatggtgtacctgtcagttacgttgaggaagctggggatccataccgagaccaaatggaggagtgcatcttcttgatcatgcaagagttgaaagctagaggaattagtaatgagcacactcttgcttatcagagtcgagtgggtcctgtacagtggctgaaaccatatactgatgaagttctcgttgagcttggccaaaaaggtgtgaagag

SEQ ID NO: 21439 - DNA, 275 bp, Glycine max
  Clone ID: 701097007H1
cgcgcacatctatttgaagtggcgtcagggcttgactcacttgttcttggggaaggtcaaattcttgctcaggtgaagcaggttgtgaaagctggacagggagtgcctggttttgataagaaaatcagtggtttgttcaagcaggcgatatcggttgggaagcgggttagaaccgagactaacatttcatctggatcagtttctgtaagctcggctgctgtggagctgcactgatgaagctaccggattcctcctttgctgattctggagtgttg

SEQ ID NO: 21440 - DNA, 271 bp, Glycine max
  Clone ID: 701099031H1
ctcgagcggaataagctacttcatggtcccatgcagcacctaaggtgtgatgggaacaatgatagtagtctgagtgaagtacttgagaatatgcgcgcccttaacagaatgtatgatcttgagacagaaacttccttgatcgaagaaaagatcagagtcaagatggaacgggttcagaagtagattcttcttcaattggtttagttttacttgattactgtgggggctgcaatcctcgccattttgtacactacagtagttgattgaggcc

SEQ ID NO: 21441 - DNA, 236 bp, Glycine max
  Clone ID: 701103594H1
ccggactgggccagttcagctgccatacactttgctccatcgttcaagtgaggaagggttgactttcaaaggaattcccaacagtatctctatctaattaaaaagagtttgtggtttccttatctatgttgtacttctgaataacatagactttatgcatgtctatgcgtaattattgcctgaacttctgcactattgtatttggatgctctcggttttcatataataaagtgtgt

SEQ ID NO: 21442 - DNA, 210 bp, Glycine max
  Clone ID: 701102610H1
gaaatatgggatgctattaagtcatgggtccaagagtatgtttccttgtattacccaacagatttggcaattcaacaagatactgaactccaagcatggtggaaggaagttgttgagaagggtcatggtgacttaaaagacaagccttggtggcctaaaatgcagactcgtcaagagcttattcaatcatgttctactatcatatggatt

SEQ ID NO: 21443 - DNA, 263 bp, Glycine max
  Clone ID: 700966759H1
tgtgaatgcaggagccttcagaagaggcttttgacattgattcagtgcccagggaggtcaagtctcaaccacttgcagagaagaaagcccctggtaaaaagcctactggtttgggtgctcctcctagtggtcccccatctactgcagatgcatatgaaaggctgcttctatccattcccgagtttgcaaactttgggaagctttttaagtcttcagaacctgtggagcttactgaagcggagacagaatatgcagttaatgtt

SEQ ID NO: 21444 - DNA, 173 bp, Glycine max
  Clone ID: 701102535H1
caatcttgcaattgtggtaccacagatggtggtgtctgcattaagtggtccttgggattccttgtttggtggtggcaacttgccggctttcatggtgggtgctgcggcagccgcgttgagcgccataatggcgattgtcttgctgccaactccaaagccagctgatgaggcca

SEQ ID NO: 21445 - DNA, 205 bp, Glycine max
  Clone ID: 701102677H1
ctcactcatacctcttcaatctaacaaacttaatttcttttgttttgagtttcttagagaatggatgcaaaaggagcaagaagtagcaacacccttttaagttgtgaggacgagatggaccttcgaagaggcccttggaccgtcgatgaagacctcactcttatcaattacattgccactcatggcgaaggtcgctggaacacgc

SEQ ID NO: 21446 - DNA, 281 bp, Glycine max
  Clone ID: 701100978H1
ttacaagcctccccaattggacgggctttatcaatatctttcaacagtgtttgcaactgatttgcattctcgtgcatttttacggcttcctaaatctgtgggtgtggattttcgtgcctcgtgtttctgccataaacaaacaattgacatgggctatgtgtgttctgtatgcttatccatattctgtgagcaccatgataagtgttcaacctgtgggggttagcatgtcaagaaaagctatgagatgaaggcaatcccagctgattaagatgaagttttca

SEQ ID NO: 21447 - DNA, 270 bp, Glycine max
  Clone ID: 701100144H1
gttttgagttttgatcaatgagactagccatgtctactccttccaagagcataatctgttcaagtgaagatgattatgaacttagaagagggccatggagtgttgaagaggattatcttctcacccattacattgccaatcatggtgaagggagatggaatttgctagctatacgttcaggactaaggagaacaggtaagagttgcagattgagatggctcaattatctaaagccaaatgttaagagaggaaatttaacctcggaagagc

SEQ ID NO: 21448 - DNA, 262 bp, Glycine max
  Clone ID: 701098778H2
gaagaagcaagagctcgaattctacagattcattcaaggcagatgaatgttcacccagatgtcaactttgaagaacttgcccggtccacagatgatttcaatggcgcacaactgaaggctgtctgtgttgaggctggcatgttggctctacgccgtgatgcaactgaggtgaaccacgaggattttaatgaaggtattattcaagtccaagcaaagaagaaagcaagtctgaactattatgcataggctggattgtggaaca

SEQ ID NO: 21449 - DNA, 268 bp, Glycine max
  Clone ID: 701099322H1
cattcacacactcaatgaagggagttacagtgaaagttgaagaaacaatggcgtatgctaatgctgcttcaactagcccaacaacatcttcaaacctctccccgcaacccatggaagggttgcacgaggtgggtccccctccgtttctcaccaaaaccttcgccgtggtggaagacccatccaccaacgacatcgtttcgtggagcagatcccgcaacagtttcgtcgtttgggactctcacaagttctctaccaccatcctgcctcg

SEQ ID NO: 21450 - DNA, 264 bp, Glycine max
  Clone ID: 701098919H1
tcgagctctgctttctgtgttattgtctggcttttggagccgatccaaccaatcatcgctgactgccaatacaaaatctcatcccttcccctttctcttactgactctctttgtcaccgggtttgtgagatgtcggatgcaccggcgagtccgagtcacgagagtggtggcgagcagagccctcgcggctcgttgtccggcgcggctagagagcaggaccggtaacttcccattgccaacatcagccgcatcatgaagaaggct

SEQ ID NO: 21451 - DNA, 263 bp, Glycine max
  Clone ID: 701103320H1
gttaccatttgctcccagcactgagcttaaccgagcttcacaaagatgaatcgggaaaaattgatgaagatggccggttcggttagaactgggggaaagggcaccgtgagaagaaagaagaaggctgtccacaagacaacaaccacagatgacaaaaggcttcagagcaccctgaagagaataggggtgaatgccatcccggctattgaggaggtcaatatctttaaggatgacgtagttatccagtttctaaatcccagagt

SEQ ID NO: 21452 - DNA, 276 bp, Glycine max
  Clone ID: 701100857H1
ctcgagccgcttcccttctcttcacatctcatctaaatctctatctctgtctctgtctctagtccgctcagctttcactccaaaccctaaccaaccgctctctttcgcctatcccggaaaccttccgaatcgtttaattgacgctacgccgtggaatcttggcggaacaaatccacgatggcggcctccaccaccagccaggtctacatccaggtaatcgacgatgtcatgaacaaggtccgcgacgagtttgtcaacaacggtggtcccggcgac

SEQ ID NO: 21453 - DNA, 267 bp, Glycine max
  Clone ID: 701102311H1
aacaagagagagctagcagtgcaagctttcaacatccaaaacaacagagagtttttggctttagaagctgaaggaatatagttatcacaatggggagagctccatgctgtgagaaaatggggttgaagagagggccatggactccagaagaagatcaaattctcatcaattacatcaacacttatggccatgctaattggcgtgcactgcccaaactagctgggctattaaggtgtggaaagagttgtagactccggtggataaatt

SEQ ID NO: 21454 - DNA, 249 bp, Glycine max
  Clone ID: 701102079H1
ccgagtttttggctttagaagctgaaggcatatagttatcacaatggggagagctccatgctgtgagacaatggggttgaagagagggccatggactccagaagaagatcaaattctcatcagttacatcaacacttatggccatgctaattggcgtgcactgcccaaactagctgggctattaaggtgtggaaagacttgtagactccggtggataaattatctgcacaccggacatcaaacggggca

SEQ ID NO: 21455 - DNA, 201 bp, Glycine max
  Clone ID: 701099256H1
cttttgtgtggggaattatggtaattgattttgagggtttgactactcatggattatgatggtatgagaaaaccttccaaaaacttatttcactctcgcttcttcctttttgggttctattgctgggattgggagttcttgaccgctctcctccttttaagttcttcccctaaatcttctttctccaaatttttaaccccc

SEQ ID NO: 21456 - DNA, 283 bp, Glycine max
  Clone ID: 701102707H1
actgtactttatccttttgtgtggggaattatggtaattgattttgagggtttgactactcatggattatgatggtatgagaaaaccttccaaaaacttatttcactctcgcttcttcctttttgggttctattgctgggattgggagttcttgaccgctctcctcctttttagttcttccccttaatcttctttcttcacaatttttatttccttccttattagacgtattagatcagattgaacaaaagggtttttctttctttctttcttggggaataat

SEQ ID NO: 21457 - DNA, 263 bp, Glycine max
  Clone ID: 701099385H1
aaacaagagagagctagcagtgcaagctttcaacatccaaaacaacagagagtttttggctttagaagctgaaggaatatagttatcacaatggggagagctccatgctgtgagaaaatggggttgaagagagggccatggactccagaagaagatcaaattctcatcaattacatcaacacttatggccatgctaattggcgtgcactgcccaaactagctgggctattaaggtgtggaaagagttgtagactccggtggat

SEQ ID NO: 21458 - DNA, 286 bp, Glycine max
  Clone ID: 701100720H1
cttagaagttgaaggagtagtctaagtcatcaaaatggggagagctccatgctgcgagaaaatggggttgaagagagggccatggactccagaagaagatcaaattctcatcaattatatcaacacttatgaccatgctaattggcgtgcattgcccaaactagctgggctgttaaggtgtggaaagagttgcagactccggtggataaattatctgagaccggacatcaaacggggcaactttaccagagaagaagaggacaccataatcagtttgcatgaaatg

SEQ ID NO: 21459 - DNA, 260 bp, Glycine max
  Clone ID: 701097113H1
ctcagccacagccacaacacacaaacacaaacccttcgttcctctctcgttcccttcttcaattcgatcaaacacagaatagtacttttttattatgatggccgtggcccgaaaggaaatggaccggatcaagggcccgtggagcccggaggaggacgaggctcttcagaagctcgtggagcggcatgggcccagaaactggtccctcatcagcaggtccattccgggccggtctgggaaatcgtgcaggctccgatggt

SEQ ID NO: 21460 - DNA, 264 bp, Glycine max
  Clone ID: 701100361H1
ctgtactttatccctttctgtgagggaattatggtaattgatatcgaggttttgactcatggattctgatcgccccagaaaaccttccaaaaatttagttcactctcgcttcttccttttcggcttctattgctgggattgggagttcttaaccgctctcctcctttttagttgttccccttaatcttgttccttcatattttttttttttcttattagatcagattgaacaaaagggttgctctttattttttaatcttgggg

SEQ ID NO: 21461 - DNA, 222 bp, Glycine max
  Clone ID: 701099874H1
cggacacaaacgttgtcactacgaaggtaacggtaacggaaataacaacaacagtaacagcgttgtcaccgtcgcctcggaaggcgtggggtccacccacactgtcagtcacggccaccaccgcgacttcgatctcaacatcccggcctttccggatttttcgaccacaggtcggagaagacgaggttgagagccctcaccctgtcatgaagaagctcgctc

SEQ ID NO: 21462 - DNA, 261 bp, Glycine max
  Clone ID: 701100471H1
cgcctccggaggtaggacccacgagtgctccatctgccacaagtccttccccaccggacaggccctcggcggacacaaacgttgtcactacgaaggtaacagtaatggaaataacaacaacagtaacagctctgtcaccgccgcctcggaaggcgtggggtccacccacaccgtgagtcacggccaccaccgagacttcgatctcaacatcccggcttttccggatttttcgaccaaggtcggagaagacgaggttgagag

SEQ ID NO: 21463 - DNA, 283 bp, Glycine max
  Clone ID: 701100647H1
gcataattcaagagctgcatgctaggtggggaaacaggtggtcaacaattggaagaagcttgccaggaagaactgacaatgagataaagaattattggaggactcacttcaagaaaaagatgaaaactccatctgatgctgctgagaaggcgagatccactcctcgaggagacagcattttcagcagcaacaacagcagttgaagcagcagcagcaacaattccaattcaacttggacatgaaagggatcataaacttgcttgaggaaaatgaccatagagtg

SEQ ID NO: 21464 - DNA, 267 bp, Glycine max
  Clone ID: 701101675H1
attgcaggatatcagtcaacctaaaacagaatatgacttacctgctggtgtactgtctgtctctcttctgagacatcagaaaattgcattggcttggatgcttcagaaggaaaccaagagtttgcattgcttgggggggattttggctgatgatcagggccttggaaagacaatttcgatgatttccctcatcctggcacagaggacattacagtcaaaatcgaaaatagatgatacatgcagtcataaaactgaagctttgaattt

SEQ ID NO: 21465 - DNA, 257 bp, Glycine max
  Clone ID: 701102484H1
cttaaccgctctcctcctttttagttgttccccttaatcttgttcctctcatatttttcttttttcttattagatcagattgaacaaaagggttgctctttattttttaatcttgggggaataatagaaatagaataagaaaagattagtgaggttgaaatgttgcaacaacgatcggtgccggcaccgttcttgacgaagacgtatcagttggtggaggatccggggacggacgaggtaatatcgtggggtgaaag

SEQ ID NO: 21466 - DNA, 262 bp, Glycine max
  Clone ID: 701102774H1
aaagactcagatgaggcgcatagagaacgccacaagcaggcaagtcaccttctcaaagcggcgtaatgggttgctgaagaaggcctttgaactttctgttctttgtgatgctgaggttgctctcatcattttctctccaagaggaaagctttatgaatttgcaagctccagcatgcaggacacaattgaacgctaccgcaggcataacaggagtgctcaaacagtgaacagatctgatgaacaaaatatgcagcatttgaag

SEQ ID NO: 21467 - DNA, 279 bp, Glycine max
  Clone ID: 701102848H1
tctttctctttctcactcactctcactctctgtcacggacagacagagaaaaactcagacacccacgtttccacttccctcacaccatcccttactgttccttcttcttcttcttccttttttttttcctcctaatggaatgatggaacacaacatcatcgttaacaacaacaacgtgatcgcaccgtttgtcataaaaacctacaacatggtgaacgttcccaccaccgataaactcatcatgtggggcccagccaacaacagcttcatcgtcctcga

SEQ ID NO: 21468 - DNA, 253 bp, Glycine max
  Clone ID: 701102963H1
atttggcttggaacgtatccagtgcctgagatggccgcacgtgcgcacgacgtcgccgcgctcgcgcttcggggcacgtcggcttgcctcaacttcgccgactcggcgtggcggctgcccttgccggcgtcgacaaatgcgaaggagatacggcgagtggcggcggcggctgctgtagcgattgcggcggaagacagctgcggcgagcagttacagaatagtattgtgaatgatgccgttgctgatgattgtg

SEQ ID NO: 21469 - DNA, 144 bp, Glycine max
  Clone ID: 701103246H1
cgttcactgtactttatccctttctgtgagggaattatggtaattgatatcgaggttttgactcatggattctgatcgccccagaaaaccttccaaaaatttagttcactctcgcttcttacttttcggcttctattgctgggc

SEQ ID NO: 21470 - DNA, 229 bp, Glycine max
  Clone ID: 701099463H1
cggctcgagattttatagtagtgcttctcaaaatttctagaacccacgtcacacgtactctgggaaggatagtcttggaaaatgcctggttccgtattatataagagtctcgccctagaatcctcgaggaggagaatttaatacactgtactttatccatttgtgtggggaattatggtaattgattttgagggtttgactactcatggattatgatggtatgagaaaa

SEQ ID NO: 21471 - DNA, 275 bp, Glycine max
  Clone ID: 701096947H1
cggaatcggctcgagcggtcgagcgatgcaaaggcagacggagtgggttgaccatctgccggcgacacggtgtgcttggagtgcggcctcgtactggagtccactctatcgacgagacctctgagtggcgtaccttcgccaacgagtccggtgacaacgatcccaatcgtgtcggcgggccctccaaccccctcctcaccgacggcggcctctccaccgtcatcgccaagcccaacggcggcggaggtggcggcgagttcctctcctcctccctc

SEQ ID NO: 21472 - DNA, 273 bp, Glycine max
  Clone ID: 701098982H1
cggctcgagggaatcatatgctgatattcgtggtttagatgctcagatacaggaaattacagaagcagtcgaacttcccctgacgcatcctgaactgtatgaagacattggtatcaagcctcctaagggagtcattttatacggcgaacctggaactgggaagacgttgctagctaaggctgtggcaaactcgacatcagcaacctttttacgtgttgttggtagtgaattaatacaaaaatacttgggagatggtccaaaacttgtaaggga

SEQ ID NO: 21473 - DNA, 262 bp, Glycine max
  Clone ID: 701097643H1
gggaagccaacttgtgtgtaatgggtgtaggaacatcttggtttaccctagaggagcaaccaatgtttgctgtgcattgtgcaacaccgttacctctgttcctcctcctggaatggacatgtcacaactttattgtggaggctgtacgacattgctaatgtacacacgtggtgctacaagtgtgagatgttcctgctgtcacactattaaccttgtaccagtactagaatctaatcaagtcattcattgtacgaactgccgg

SEQ ID NO: 21474 - DNA, 266 bp, Glycine max
  Clone ID: 701098039H1
tgagaattttgctgagtctcaacttgttcccaagatgccaaaacaagcttctgaagagcctaagaagaaaaagaaagtgaagctgccacttccattagttccagctgataacaatcaaaatgcctcacaacctgttaggcaatgcatgcattgtgagataaccaagacaccacagtggagggcagggccaatgggaccaaaaacactatgcaatgcttgtggtgttcgttacaagtccggccggctcttccccgagtaccggcctg

SEQ ID NO: 21475 - DNA, 260 bp, Glycine max
  Clone ID: 701098025H1
cgctttgtgctgctgctgctgcaaaacctagggttgagccttttgctcaggttttcagcgcttctttcttacaatggttctacagaacgatattgatttgctgaatcctccagctgagttggagaagagaaagcacaagctcaagcgtcttgtgcagtcaccaaactctttcttcatggatgttaagtgccagggctgcttcaacataacaactgtgtttagccactctcagactgttgtggtttgcggaaactgccaga

SEQ ID NO: 21476 - DNA, 251 bp, Glycine max
  Clone ID: 701098180H1
cacatggtcatagtctacacctaattagccacacacaccacagcaccaaactagttggctcaattctctttgaatggctttggaggctttgaattcaccaacagcagccaccactcccttccgtggttaccaagaagaggaggaggaggttgaccttcacctacgcgagccttgggccaagagaaaacgctccaaacgacctcgttttgagtcggaggaagagtacttggcctctttgcctcatcatgctt

SEQ ID NO: 21477 - DNA, 275 bp, Glycine max
  Clone ID: 701100412H1
catggtcatagtctacacctaattagccaaacacaccacagcaccaaactagttggctcaattctctttgaatggctttggaggctttgaattcaccaacagcagccaccactcccttccgtggttaccaagaagaggaggaggaggttgaccttcacctacgcgagccttgggccaagagaaaacgctccaaacgacctcgttttgagtcggaggaagagtacttggctctttgcctcatcatgcttgcacaaagcggtaactacaacaacacc

SEQ ID NO: 21478 - DNA, 276 bp, Glycine max
  Clone ID: 701102104H1
ctcgagccggtctacacctaattagccaaacacaccacagcaccaaactagttggctcaattctctttgaatggctttggaggctttgaattcaccaacagcagccaccactcccttccgtggttaccaagaagaggaggaggaggttgaccttcacctacgcgagccttgggccaagagaaaacgctccaaacgacctcgttttgagtcggaggaagagtacttggctctttgcctcatcatgcttgcacaaagcggtaacaacaacaacaccca

SEQ ID NO: 21479 - DNA, 263 bp, Glycine max
  Clone ID: 701103336H1
cagaaacatccacaacaacaacacccaattaccgtcttcttcactgtcagacaaagaagcgtcgccgccggtgaaactaacacacaggtgcaccgtttgcaacaaggcctttggttcttatcaagcactcggtggacacaaggccagccaccgcaaggcctcgtcggaatccaaccccaccgcctccgtctctgccctagccaacgacagcgtttctgcttccaccgtcggcggcggaaggatgcacgagtgttccatctgta

SEQ ID NO: 21480 - DNA, 251 bp, Glycine max
  Clone ID: 701103165H1
gagaatgcaggatccaacgttgttccaacccatgaaaccccactttccggaacaggagcagcttaaatgaccgaggtgtgactccaccaacaccaagttctggtaatacaacaactacaacctctcgcagccacgccatttttgcaagaactgcagaaggtattggaccaaaggtggtgccctgagaaacatccctgttcgtggtggaagcagacagatcacaaagcgatcatcttcatccaacaacaaca

SEQ ID NO: 21481 - DNA, 262 bp, Glycine max
  unsure at all n locations
  Clone ID: 701097644H1
ttcattcttataataatcattattttcttccacaccttcgtccgcttctgncgccgtcgccgccgtcgcctcttctctcgttcgcttccgaccaattcctccgccgccgcctctctcgacgacccgtgcctcgacccttccgtcatcaagtcccttcccacttttactttctccgccgccacccaccgctctctccaggactgcgccgtttgcctgtcggagttcgccgacggcgacgagggccgcgtgctcccgaattgta

SEQ ID NO: 21482 - DNA, 259 bp, Glycine max
  Clone ID: 701097528H1
aaatgtcttccccagtgatcagcgagatcctcctctctggcttcaccataaactcttccctaagacgcaggacacacttggtgcaatctttctcagttgttttcctccactggttctacgttttctcatgaactaaattaactgacctcgtacataggagtataaacatagtactcgtgttcttttttcaatactacatcacattcagatcattaaatctagctagcaaattagagttattatttattatcattgcaca

SEQ ID NO: 21483 - DNA, 289 bp, Glycine max
  Clone ID: 701099951H1
ctctactggttctacgttttctcatgaactaactccctctcaatcccctaccctaattcctccaatttccccattttttttctaattaatcagatttgcaaaatcctaatttctctattctaacaaaaaccccaaattcaaacaaatccaatggcttcgattccgcgtccggcgagttcgggatcttcggagggaggaggagatccggctgcgatggacgagagaacgaggaagcggatggagtcgaaccgcgagtccgcacggcgatcgcggatgaagaagcagaagc

SEQ ID NO: 21484 - DNA, 252 bp, Glycine max
  Clone ID: 701099652H1
ggaacagaggaagaggaagagaatgttgtccaatagggaatcggcacgtagatcgaggataaggaaacagcagcacctggaaggtctgagtgcccaattggatcagcttaaaaaggagaacgcacaaatcacacaaacataagcatcacgacgcagatgtacctcaacgtggaagctgagaacgcgattctgagggctcaaatgggggaactgagcaacagattgaactctctgaacgaaatgataagtttc

SEQ ID NO: 21485 - DNA, 205 bp, Glycine max
  Clone ID: 701102682H1
cagctgccaagcttgctgaacttgccttgattgaccccaaacgtgcaaaaaggatatgggcaaataggcagtctgctgcaaggtcaaaagagagaaagatgcgatacattgctgagcttgaaaggaaggtgcaaacattgcaaacggaagcaacatctttgtctgcacaattaactctcttgcagagagatacaaatggcttaaa

SEQ ID NO: 21486 - DNA, 259 bp, Glycine max
  Clone ID: 701099882H1
gatttgtaagcggtcgccagagaagttgtttcgcattttggacatgtatgaggctttgagggatgctatgcctgatttgcaggcaatggtttctgatgagtttgtgattggtgaggccaatggagtgctgagtgggcttggtgaggctgcaaaagggacttttgctgagtttgagaattgtattaggaatgagacttccaagaagccggtcataaccggggatgttcatcctttgcctcgttatgttatgaattatctc

SEQ ID NO: 21487 - DNA, 269 bp, Glycine max
  Clone ID: 701102444H1
attctacggcatcgagtccctcctcgtcaattccctttccaacccttctcaattggaaccttttaatctccaaaaatcgcttcttttacccttgaacggacgcgattccccctccgccctcgccgccaccgcttccggcgcctccacgtcgcgcacggcagcaagatcacctccttcgactggtccctccgccgcaaatccaccgtcctgactcaatttaccgccgtggattccctcctcgccctctcgccggccctcgccgccgccgg

SEQ ID NO: 21488 - DNA, 258 bp, Glycine max
  Clone ID: 701098613H1
cctcgagcgaattcggctcgaggggaaaccataaattgggaacacgtcaccaaatccacctccaccgtccaagccatcggatcctcgccggaaaacatgttcgtgagcttcgaatcttcccgcagaaactcgaattcgataatggtttacgatttgcataccctaacacccgtcacggagatcagtcacaacgagatcttcggcgcgaacatcgattcggcgattccggcgacgaagttgcaatggattgagggatat

SEQ ID NO: 21489 - DNA, 278 bp, Glycine max
  Clone ID: 701099791H1
gagcaggaccaccgcaaaaaagttctccgcgaactcaactccctgatctccggctcctcctcctcctccgccgcctccgacgacgtcgacgaggaggtcaccgacaccgagtggttcttcctcggtctccatgacgcagtccttcgtcaacggcggaggacttcccggacaggccttcttcaactccgctccggtgtgggtcaccgggggcgaccgtctctctgcctcggcctgcgagagggcgaggcagggacacgtgttcgggctgcaaaccctgg

SEQ ID NO: 21490 - DNA, 257 bp, Glycine max
  Clone ID: 701102929H1
cacaaacaaaaactcccgttttctctctctgtttttccatggccatctgatcaaacttttcttgattctctctctcagtttttgctattctgagtgatgggtatgccctgccgctgttcccacacctcccacatcactgaaatcatcatcaccagcttcttccgccacaagtcttaaattacaacaatttccctcaattattcatcaaccaaccaccttaatagccttttcaaatggttcctgaaagatccaacttg

SEQ ID NO: 21491 - DNA, 285 bp, Glycine max
  Clone ID: 701100975H1
cgatcaatcattaaaggcttacttcttcttcttcttcttcttcttcttcttcttctaacaacaataagatcccatctttcccactcatgaagagacttaacagctcagattcttccactgccctcatgacaatttttccatcatcatcaacagaggaacatagtccgaggaacagccaccacatgtatggcagggagttccgatcgatgttggacggactcgacgaggaagggtgtgttgaagaaccggggcatcaatctgagaagaagcgtcgactaagtgtgg

SEQ ID NO: 21492 - DNA, 253 bp, Glycine max
  Clone ID: 700966827H1
ggattatcttataggataataccaaattagaatgaaaattatcctgtgagaagtgaaattgtgattgtgaattgaatgaaggatgctcgaatttgagttattgatatggcttttgagtcgcactatgttttgttgctctgttccttcaaagaacaattgcagcagcatgtccgggtccatgcaatggaagcagtaatggcttgttgggatatagagcaatcattgcagagtctaacaggagtttcacctggag

SEQ ID NO: 21493 - DNA, 272 bp, Glycine max
  Clone ID: 701100165H1
cgctgtttcgacggtcacacgcagttgtattgtagaactgaccaagggtttctctttctctttctctgtctgcttcttcactttctctcgtttcaatcgaaaaaaatcatgggcagaaaattcttcgtcggtggcaactggaaatgcaatgggaccactgatgaggtgaagaagattgttactactttaaatgaagctaaagtccctggagaagatgttgtagaagttgttgtgagccctccttttgtgttccttccttttgtaaaaagttt

SEQ ID NO: 21494 - DNA, 148 bp, Glycine max
  Clone ID: 701098308H1
aaaaacatgggcagaaaattcttcgtcggtggcaactggaaatgcaatgggaccactgaggaggtaaagaagattgttactactttgaatgaggctaaagtccctggagaagatgtcgtagaagttgttgtgagccctccttttgtgt

SEQ ID NO: 21495 - DNA, 274 bp, Glycine max
  Clone ID: 701099780H1
tctttttcttctctctcaacaacttcaccttcttcctcctcgatcatgtctcacttcaagggcaagtaccatgatgagcttatcgccaatgctgcgtacattggcactcctggaaagggtattcttgctgctgatgagtcaacagggacaattggcaagcgtttggccagcatcagtgtagagaacattgaatccaacaggcgagctcttagggagctgcttttcactgctcctggtgttcttcaatatctcagtggtgtcatcctctttgagg

SEQ ID NO: 21496 - DNA, 300 bp, Glycine max
  Clone ID: 701102865H1
tcggcattcggctcgatctcaagtccaacctacccctttttcttctcccaccaacttcaccgtcttcttcctcgatcatgtctcacttcaagggcaagtaccatgatgagcttattgccaatgctgcttacattggcactcctggaaagggtattcttgctgctgatgagtcaacagggacaattggcaagcgtttggccagcatcagtgtagagaatgttgaatccaacaggcgtgctcttagggagctgcttttcaccgctcccggtgctcttaaatatctcagtggtgtcatcctct

SEQ ID NO: 21497 - DNA, 258 bp, Glycine max
  Clone ID: 701100040H2
gtccaacctacccctttttcttctcccaccaacttcaccgtcttcttcctcgatcatgtctcacttcaagggcaagtaccatgatgagcttattgccaatgctgcttacattggcactcctggaaagggtattcttgctgctgatgagtcaacagggacaattggcaagcgtttggccagcatcagtgtagagaatgttgaatccaacaggcgtgctcttagggagctgcttttcaccgctcccggtgctcttaaata

SEQ ID NO: 21498 - DNA, 283 bp, Glycine max
  Clone ID: 701101779H1
ctctaacctacctctttttcttctctctcaacaacttcaccttctacctcctcgatcatgtctcacttcaagggcaagtaccatgatgagcttatcgccaatgctgcgtacattggcactcctggaaagggtattcttgctgctgatgagtcaacagggacaattggcaagcgtttggccagcatcagtgtagagaacatcgaatccaacaggcgagctcttagggagctgcttttcactgctcctggtgttcttcaatatctcagtactgtcatcctctttg

SEQ ID NO: 21499 - DNA, 252 bp, Glycine max
  Clone ID: 700966844H1
caacttcaccgtcttcttcctcgatcatgtctcacttcaagggcaagtaccatgatgagcttattgccaatgctgcttacattggcactcctggaaagggtattcttgctgctgatgagtcaacagggacaattggcaagcgtttggccagcatcagtgtagagaatgttgaatccaacaggcgtgctcttagggagctgcttttcaccgctcccggtgctcttaaatatctcagtggtgtcatcctctttg

SEQ ID NO: 21500 - DNA, 257 bp, Glycine max
  unsure at all n locations
  Clone ID: 701098073H1
aagcaacctctaacctacctctttttcttctctctcaacaacttcaccttcttcactctcgatcatgacacacntcaaaggcaagtaccatgatgagcttatcgccaatgctgcgtacattggcactcctggaaagggcattcttgctgctgatgagtcaacagggacaattggcaagcgtttggccagcatcagtgtagagaacattgaatccacaggcgagctcttagggagctgcttttcactgctcctggtgt

SEQ ID NO: 21501 - DNA, 263 bp, Glycine max
  Clone ID: 701097640H1
aacctctcaagtccaacctacccctttttcttctcccaccaacttcaccgtcttcttcctcgatcatgtctcacttcaagggcaagtaccatgatgagcttattgccaatgctgcttacattggcactcctggaaaggggtatcttgctgctgatgagtcaaccaggaccattggcaagcgttttgccaacatccgtgtagaagatgttgaattccacaaggcggctcctaaggaactggttttcaacggttcccgtgctcct

SEQ ID NO: 21502 - DNA, 262 bp, Glycine max
  Clone ID: 701100047H2
ctctaagcatccatggccatggcgtctgcaaagctcaacaccttgtcttcccagtggatcgcccacaattccttctctcctcgccgtggatcttcttctcgctgagttctgtcttccgatccgcgcttcttcttaccaacacgaactcgtccaaaccgccagatctattgcatctcccggtcgtggaattcttgcaattgatgaatcaaatgccacatgtgggaagcgtttagcatccattggattggacaatactgaggtg

SEQ ID NO: 21503 - DNA, 260 bp, Glycine max
  Clone ID: 701103461H1
cttctcacttcgtcaaaaccaaccaaacccctccccaattctcaagccaaccatgtcttccttcaagagcaagtaccaagatgaactcattgccaatgctgcttacattggcaccccagggaagggtatccttgctgctgatgagtcaactggtacaattggcaagcgattggccagcattaatgtcgagaatgttgaagcaaataggcgtgctcttcgtgaactcctattcaccacacctggtgcttttgagtgcctca

SEQ ID NO: 21504 - DNA, 258 bp, Glycine max
  Clone ID: 701102931H1
agatgacaagataattgctgtctgtgctgatgatcctgagtataggcattacaatgatatcaaggagcttcctccacaccgtttagctgaaattcgtcgtttctttgaagattacaagaagaatgagaacaaggaagttgcagtgaacgactttcttcctgcctcagctgcctatgaagcgatcaagcattccatgaccttatatgcggaatacgttgtggagaacttgaggcggtagtgttgattcctgggtgcttg

SEQ ID NO: 21505 - DNA, 196 bp, Glycine max
  Clone ID: 701101791H1
ctgaactctctctctcatctataagtcaacatggctcatcatgaagcattcaagtgcatcgaattcgagtagacctcaccctaagctcaatgaaagaattctgtcatctctgtcacggagaactgttgctgctcacccctggcacgacttagagattgggccaggagttccagcagttttcaactgtgtggttgaa

SEQ ID NO: 21506 - DNA, 261 bp, Glycine max
  Clone ID: 701103318H1
agtatgagagccacgctggttttactcttcctgggctctatagggttgtccatggcattgatgtttttgatcccaagttcaatattgtctctcctggagctgatatgtcaatatatttcccctactctgaaaagcagaacagacttacagccctgcatggttcaattgaacagctattatttgctcctgagcagactgatgaatacattggtttattgaaagacaagtcaaagcccataattttctccatggcaaggctag

SEQ ID NO: 21507 - DNA, 253 bp, Glycine max
  Clone ID: 701098655H1
ggattccttgcagcccttgcttgatttcctccgagctcacaaatacaagggccatgctctgttgttaaatgatagaatacaaaccatttccaaacttcagtctgcattggccaaggctgaggattatctctctaagcttgcacatgatacactctattcagagtttgaatatgtattgcaaggcatgggttttgagagaggttggggtgctactgctgaacgggtattggagatgatgcatctgctattggat

SEQ ID NO: 21508 - DNA, 268 bp, Glycine max
  Clone ID: 701097096H1
cgataatctcccaactggggatgaggaaggcctctattatgcattggatcttggcggcacaaacttccgtgtccttcgtgtacatttaggggggaaagacaaaggtgttatcggccaggagtttgaagaagtttcaattcctccaaatttgatgactggctcttcagatgcattgttcgattttatagcagcaggtcctgcaaagtttgttgggtcagaaccctgaaggtttcatctccccctgggaagacaagaggactgggtttac

SEQ ID NO: 21509 - DNA, 268 bp, Glycine max
  Clone ID: 701102877H1
attttgggcatccttaagaaaataggaagagacacggttaaggttggggagaagcaaaagtcagtgatagctttggatgggggattgtttgaacactacaccaaatttagagaatgcttggagggtaccctgaaggaattgctgggagatgaggctgctgagaccattgtcattgagcatgctaatgatggctctggcattggtgcagccctcctggcagcttctcactcccaatatttgggagtggaggagtcttaaattttattgc

SEQ ID NO: 21510 - DNA, 224 bp, Glycine max
  Clone ID: 701103285H1
ctcaaacacatcccttaaaatgaggaagatcgttgttgaactgtgtgacattgttgctactcgcggagctcggcttgctgctgctggtattttgggcatccttaagaaaataggaagagacacagttaaggttggggagaagcaaaagtcagtgatagcgttggatggggggttgtttgaacactacaccaaatttagagaatgcttggagagtgcactgaagg

SEQ ID NO: 21511 - DNA, 265 bp, Glycine max
  Clone ID: 701101576H1
cggctcgagccggcgtgtccctcgcggaggctccgggattcctcaaggcccccggcggcgccccccgcaacgttgccatcgccgtcgcgagactcggcgccaaagcggcgttcgtcgggaagctcggcgacgacgagttcgggcacatgctggcccgaatcctgaaggagaacgacgtgcgatccgacgggatcaacttcgaaaagggcgcgcgcaccgcgctggcgttcgtgaccctacgcgccgacggggagcgtgagttcat

SEQ ID NO: 21512 - DNA, 263 bp, Glycine max
  Clone ID: 701103083H1
gcttggagcacaagaaagctctttactgaactgtacaccaaaggaagacttcggaggaggacacccagaccccaatttgacatatgcaaaagagttggttgctcgtatgggattgggcaaatccgaaccccaagaagagcccccagagtttggtgctgcttctgatggtgatgcagatcgcaacatggttcttggtaaaaggttttttgtcactccttcagattccgtggccattatcgctgcaaatgctgttgaagctatac

SEQ ID NO: 21513 - DNA, 228 bp, Glycine max
  Clone ID: 701101473H1
actcgagccgaatcggctcgagatcgagaagttgattactctgacaactcagttacagaaaataactcgtgcagcttatcctatacagtacattccaaatgcaaagttaccttgtgttggccctcacccaaagaatgtcatacttttggcatgtgacgcatttggtgtactcccacccgttagcaagctaaacctggcacagaccatgtaccatttcatcagtggata

SEQ ID NO: 21514 - DNA, 241 bp, Glycine max
  Clone ID: 701103555H1
ccctcaccgaagaagaacgtcataagcaacaactccaatccatcagtgcatctctggcatcactgaccagagaaactggaccgaaactggtgaagggagacccagctaggaagtcagatacccagaaggttactcacgtgcaccatcatgtcagcactcccaccattgttgtcagcgacagttctttgaaatttacccatgtcctctacaatctctccccagctgaactttatgaacaagc

SEQ ID NO: 21515 - DNA, 251 bp, Glycine max
  Clone ID: 701099310H1
atctcgagcgtatcggctcgaggcttcgttgaaggagatgagactcggtggtgaggatactagcaatggtcatggtgacggtggtgtgagggacttgtatggagaggattgtgccactgaggaccagcttatcactccatggactttctctgtggccagtggatgcagtttactgagagatccacgctacaacaaagggctggcctttaccgagggagagagagatgctcattacttgcgtggccttttgc

SEQ ID NO: 21516 - DNA, 242 bp, Glycine max
  Clone ID: 701103522H1
gcttcgttgaaggagatgaggaacggtggtgaggattatagcaatggtcatggtggtggtggtgtgagggacttgtatggagaggattgtgccactgaggaccagcttatcactccatggactttctctgtggccagtggatgcagtttactgagagatccacgctacaacaaagggctggcctttaccgagggagagagagatgctcattacttgcgtggccttttgcctccagctatctt

SEQ ID NO: 21517 - DNA, 268 bp, Glycine max
  Clone ID: 701102792H1
ctgtggtattagcaggattgcttgcatccctgaaattagttggtggaacttagttgaccataccttcttattcctgggtgctggagaggctggaactggtatagctgagctgatagctcttgagatttcaaagcagactaaagctccagtggaagagacccgcaagaagatctggctcgtggactcaaagggacttattgttagctctcgtttggaatcacttcagcagttcaaaaagccttgggcccatgagcatgaacctgttaag

SEQ ID NO: 21518 - DNA, 270 bp, Glycine max
  Clone ID: 701098731H2
ctgaaattagttggtggaaccttagttgaccataccttcttattcctgggtgctggagaggctggaactggtatagctgagctgatagctcttgagatttcaaagcagactaaagctccagtggaagagacccgcaagaagatctggctcgtggactcaaagggacttattgttagctctcgtttggactcacttcagcagttcaaaaagccttgggcccatgagcatgaacctgttaagagtcttctggatgctgtcaaggcaatcaag

SEQ ID NO: 21519 - DNA, 286 bp, Glycine max
  Clone ID: 701100721H1
caagagatagcccaaattgtagcaaagcaccccaggcttctggttctctctgatgaaaattatgaacacataatttatgcaccggcaactcatacaagctttgcatcgttaccgggaatgtgggacagaactctaattgtgaatggactttccaagacatttgcaatgactggttggcggcttgggtatattgctggtccaaaacattttgttgctgcatgtgaaaagattcaaagccagtttacttcaggggcaagtagtatatctcagaaagctggggttgctg

SEQ ID NO: 21520 - DNA, 266 bp, Glycine max
  Clone ID: 701101575H1
cctcgagccgcttccgcaaatcgcttctcacgacagcatctccgcttctccaacctccgcttcaccttccgtcttcaatcacctcgttcgtgctcccgaagatcctatcctcggggtaactgtcgcttataacaaagatccaagtccagttaagctcaacttgggagttggtgcttaccgaactgaggaaggaaaacctcttgttttgaatgtagtgaggcgagttgaacagcaactcataaatgacgtgtcacgcaacaaggatt

SEQ ID NO: 21521 - DNA, 273 bp, Glycine max
  Clone ID: 701102885H1
caacattttactgggtatataagtggagagtgtaactgaaattatgtggaggtgcatcaatggaagaattgccagaagatttttatccacttcttctgccagtgcccgtggttggtgggaccatgtaaggccagcaccgaaggaccccattgttcgtgtgaacgaggcatttctagctgacccttttccccataagatcaatcttggaataggtacttataagggtgatgatggcaaagctttcattcctcaaagcgttcgtgaggcagaaac

SEQ ID NO: 21522 - DNA, 275 bp, Glycine max
  Clone ID: 701096990H1
atttttcattcgttgtgatcttcctcttcctcgtacacaggtgagcgactgaaaggtagcaatggcgaccaggaacttggaaaagatggcatccattgatgcacagttaggcaattgctcctgcaaagtgagtgaggatgacaaactgattgagtatgatgctcttctgctggatcggttccttgatatccttcaagatttacatggggaggatctgaaggaaacagttcaagaagtgtatgaactttcagctgagtatgaaggaaagcatgacc

SEQ ID NO: 21523 - DNA, 272 bp, Glycine max
  Clone ID: 701099785H1
gaggaggtggacctactcatcttgctattctgtctcaacctccagacacaatccatggatcacttcgtgtgacagtccaaggtgaagtcattgagcaatcatttggagaacaacacttgtgttttagaacactacaacgtttcactgctgccactctagaacatggcatgcaccccccgatttctccaaaaccagaatggcgtgctttgatggatcagatggctgtcattgctactgaggaataccgttccattgtattcaaggaaccacgc

SEQ ID NO: 21524 - DNA, 178 bp, Glycine max
  Clone ID: 701102507H1
ccgtgttcccactgtggatgtctctgttgttgacctcacagtgaggctggagaaggaagcctcctacgatgaaattaaaaatgctatcaaggaggaatcagagggcaagttgaagggaattcttggttacactgaagatgatgtggtctccaccgactttgtgggcgatacagatcaa

SEQ ID NO: 21525 - DNA, 249 bp, Glycine max
  Clone ID: 701099668H1
tggcagcatcacgatgtcaccgttaaggacgagaagacccttctcttcggtgacaaggcagtcactgtttttggacacagaaaccctgaagagatcccatgggggtcaactggagctgacatcattgttgagtcaccggagttttcaccgataaggacaaggctgccgcacatttgaagggtggtgccaagaaggttattatttctgcccccagtaaggatgcccccatgtttgttgttggtgttaatg

SEQ ID NO: 21526 - DNA, 207 bp, Glycine max
  Clone ID: 701102605H1
atttggtgaagcattggataagacccagaccgtcatttggaatggaccaatgggtgtttttgagtttgataagtttgccacaggaacagaggccatagccaagaaactggcagagctgagtgggaagggagtaacgaccatcattggaggaggtgactctgttgccgctgtggagaaggttggtcttgcagacaagatgagccacat

SEQ ID NO: 21527 - DNA, 241 bp, Glycine max
  Clone ID: 701097188H1
cctcattcttatttctttcctctcttcactttcactctctctctctctctcagccatcatcatgggagcagtgattctcccagatctcggcactgagattttgattccggtctgcggcatcatttgaatagggttcgccctcttccagtgggtcctcgtctccaaggttaatctctcctttggcagagacgcttcccctaacgccgctggcaaaaatggttacaacgattacctcatcgaa

SEQ ID NO: 21528 - DNA, 206 bp, Glycine max
  Clone ID: 701099843H1
ctctcgagccgaatcggctcgaggaaagatgtcaagaattggcagcacttcttgtgtgttgcagttggtctttgggcaggtcttattattggatttgtaactgagtactatactagcaatgcatatagtccggtgcaagatgttgcagactcctgcaggactggtgctgcaactactgttatatttggccttgccttgggatacaa

SEQ ID NO: 21529 - DNA, 211 bp, Glycine max
  Clone ID: 701099340H1
ccttgatgctgccggaaacacgactgccgctattgggaacggacttgccattggttctgctgcccttgtatcactggccctctgtggtgcctttgtgagccgagctgctattacaactgttgatgtcgttgactccaaaggttttcattggtttgattgtgggtgcaatgcttccttactggttgtctgctatgactatgaagagtgtcgg

SEQ ID NO: 21530 - DNA, 145 bp, Glycine max
  Clone ID: 701097793H1
caatattccaatttttgctattgcaattagtatttttgttagtttcacctttgctgccatgtatggtatagctgttgctgcgcttggcatgctgagtaccattgccaccggattggccattgatgcatatggtccaatcagtgac

SEQ ID NO: 21531 - DNA, 178 bp, Glycine max
  Clone ID: 701103017H1
ctcattcttatttctctcctctcttcactttcactctctctctctctctcagccatcatcatgggagcagtgattctcccagatctcggcaccgagattttgattccggtctgcgacatcattggaatagggttcgccctcttccagtgggtcctcgtctccaaggttaagctctccg

SEQ ID NO: 21532 - DNA, 247 bp, Glycine max
  Clone ID: 701099192H1
tccactcacacctcatcgtttctctctctagatctctgtttcttctttttctccaaccttcgtttcaccaccacacttacattactttgtcgaaatggctccaccaattgagaccccaaacaaggtttccagctatcaacagtccccaaaccctcgtcttaacgagaggattctttcatccatttccaggagacacgttgctgcacacccgtggcacgatcttgagataggacccgaagctccaaag

SEQ ID NO: 21533 - DNA, 256 bp, Glycine max
  Clone ID: 701099236H1
cgtttctctctctagatctctgtttcttctttttctccaaccttcgtttcaccaccacacttacattacttcgtcgaaatggctccaccaattgagaccccaaacaaggtttccagctatcaacagtccccaaaccctcgtcttaacgagaggattctttcatccatttccaggagacacgttgctgcacacccgtggcacgatcttgagataggacccgaagctccaaaagattccaactgtgtggccgaaatag

SEQ ID NO: 21534 - DNA, 270 bp, Glycine max
  unsure at all n locations
  Clone ID: 701097076H1
gaacgtacccgccaacttgatggtgctcatgttgaattcttgagaggagttgctaatccacttggcatcaaggtgagtgataagatggttcccgatgaacttgttaagctgatagatattctgaaccctaaaaacaagcctggaagaattacagtcattgttagaatgggagctgagaatatgcgagtgaagcttccacatcttatcagggcagttcgcagagcaggtcaattgtcacttgggttagtgacnccatgcatgggaacacca

SEQ ID NO: 21535 - DNA, 259 bp, Glycine max
  Clone ID: 701097139H1
cggctcgagtgaaaatatgagggtgaagcttccacatctcatcagggcagtgcgcagagcaggccaaattgtcacttgggtcagtgatcctatgcatggaaacaccattaaggctccctgtggtcttaaaactcgccccttcgattccatcagggccgaagtgagagcattcttcgacgtacacgatcaagaaggaagccacccaggaggggttcatctagagatgacgggtcagaatgtgacctagtgcattggtggg

SEQ ID NO: 21536 - DNA, 462 bp, Glycine max
  Clone ID: jC-gmro02800022f01d1
aatcatcaaaagtcattttgtaccaaatctttgaaagcatgcatacatcaataaaggtgatcgatagatatgtatctactccttgacagaagaattcatgaatacaggtcattgcattgcatgacttggacaaaagcagaccctatattcacctcttcttctatctctctctctctaaacatattaaaaataaccaagatgagctgtaaaatcctcacattgctcgaatagaaatgtaataataataataatgtatacaaaatagagtaaccatgtgtatcctattgttagtgatctgaacaacttcaagcggatagatagaaacagtgaagagaaagaaaacaatgcaggttgatatttatgttctcccaatatttcttttctttccttaccatgaagacccttcaccaaccagtccaatatccagttgaattatttccttgttctttattgtgttccact

SEQ ID NO: 21537 - DNA, 446 bp, Glycine max
  Clone ID: jC-gmro02800022f02d1
cctaaaagtagtacaccgttgttgttgttttttttatttattaaaaaagtactacaccgtttttccatacttgaatggaaatttggttttcagcatggtttgctttacgattgaataattattaatattaccccctgccgtacggtcgagagtagtaataatcaaccttccatctccgaccccacgccatgcagccattgatctctggtctctctttttcttttgcacagtatttcattttctacctttaaacaaaaatttcttaaaagcggtttaatttccatgtttcttttctcagctccactgttctggacagtaccattgaagggtcggtgcttgttcattccgagaagaaatttgcaggcctcattcgcgctgaggaaaatgtgctccttcatttttacgttctgcgcgtggtgatgatccggtttttggaactgaaaaca

SEQ ID NO: 21538 - DNA, 557 bp, Glycine max
  Clone ID: jC-gmro02800022f05d1
gataatacggaaaatactttattgcaaaaccaacaaacacatgaaagatacatcagaaaaattttaaaacctacacaatccaacagaaagcatgaagtttggcacatccaaatgcctttttattacacaaatattatttagttgaaaggtcaagaacgaccaatacttcactatggctattaagatccaacatgaaacctactcgatgactaacttcttttttatcttcacaacgaactcatagaccttgtgctgatcaggaagagactttgcaacactctctttctgtaggcacctcttggcccaagcaacaaacctggggcactcattctcaatgttgaggctgccaaaagtctcatagactttgaaccaagtgtagaatggaacaagtgctatatccacaaaaccaatattgtctccttcaaaataagtcttatcttccagctgttcctccaacaatttaagggcctttatgaactccttcttggcagcttctttattttctccctttgatgtccaaatcttctttccaagatcatgtatcttaatgtcaacat

SEQ ID NO: 21539 - DNA, 519 bp, Glycine max
  Clone ID: jC-gmro02800022f08d1
gatacttaattattatctttttataccacacgttggtttccttcatgagtacaaaccgaaataaaaccaacaattaatcttgttttattacaacacacaagcttgacatttcagtacaatagtttattttcaagcaatgagattttaaaaccagaaccacaaacgaaacaccgttgagattctcaacgtgttcactcctgatcaagcagagatatcagagactaaaagttggcaaagttcttttctttcaaagtttccactgtctttttaagactcacttccaaaggaataaattcaatccccaaggtctttgccttttctttggaaacctgaaatgttggtacataaggcttatcgtctgcagacttttctggaatttgatatgtcgggtactgatcacgttaaatcctggcgagttcagagaagtgtgccactcttttaactaaacaattatttccactagctgaagcaatctcatatgccggaatatgtgcgtttgcaacatctttcacattgatc

SEQ ID NO: 21540 - DNA, 527 bp, Glycine max
  Clone ID: jC-gmro02800022f10d1
aagttgctataaattcaaaataattatgaaattttttcgtgtcacaataatgtttcatcacacttccagtaaaaataatcataaatttgggcaatttgccctttctttagacacttgtacatttaaaataagtttccaaccttacagaagtcctcaaaaaattacatgaaaagatttacacaagggaggatgggagaatgttgaaaaataaatacttgtagacaatacactgacctcaaaataatcattcatccagtacatatggggcatgaatttaatagtgaccaacaaacttatagttgacaatcaggtcacatccatcatactaaacaacacccctgctcggtttgcatgccaccagtccaagaggtcatttccaacaaaactttgatcctgctgatagagatcgggtcaaaccttagagaaagccttctactgtccaggcagcacctgacttgtcattatgagtgacacctttactattagatgcacttccatagatatcatcaaatccatcatctttggca

SEQ ID NO: 21541 - DNA, 359 bp, Glycine max
  Clone ID: jC-gmro02800022f11d1
cttcttctcttcttttttttttttcttttttttttttttccgggggcaatataccctttctgggttttattcttggccccccctcctcaactgaaacccctttttattggtccgaaagggctccaatacctgttttgccctccccaaaaaatctatttttccctaaaaactttttggcaccccctttttaaacaaaaacccccacaaaaatattggaccccctttttatcaagggaactttgtgggggggggcacaaaaaaaattgggtttccaatactctttccccccattgttaaacgcccattgggaaaaaaggcttccaccataatttttcccgggccacaaaagctctttttgg

SEQ ID NO: 21542 - DNA, 408 bp, Glycine max
  Clone ID: jC-gmro02800022g03d1
aagcaaagacaaaatgaattccattaacagctttaacaagtccaaacaatccgaaactcagctacagaaattttaaaataatgtaaaaccaaaactcaacgcatgacaaattagtgctctagttgacaacacgacaaaaactggaagctcgaaggaggcggacagttagtacctccttccagggccgccacggccgaagccgaggggcgcctggacggcaacaggatccacctgaacgatgccaggaacctcggacatcccgagggcggcgagcatgtcgagcgtctccttgtcgacctcgatctggtcggtcctgatggcggagacatcggggacgaagtccatgcgacgctcgcgttcctcctcctgcagcttcagggagattccacgcacgggacccttctggat

SEQ ID NO: 21543 - DNA, 534 bp, Glycine max
  Clone ID: jC-gmro02800022g04d1
aaaaagcaaaaccaaacatccaagacatttatacaacataggtatacatataacatacagattcatataacaacaggttgggatattctccggttcacattcagtaattagtgctacaagaggaaaccattcacttaatcaaacaaagtgaggaaccaatcctcatcttctatctcccctcctgccattgacctcaaaacgttaaaaggggggctgaagcgttgtatacggtggttcgaccaaaccccccaaatgaaccgagttctggtactgccaaagccggtgataggtgctaccttccaaaagacacaaacagagaggaacaggaagcagtagtccccaggtcacagaactctcaaattgaccaccatagatgttatgacaataacaagtaatgctacacaatcttataactacaccaccttactacaaactagaaaaagagaaaagacaggattcataagtgggggagagaaaaaaaaaaaagagaacccaagcaaaatgtcaagctttagatatgtatgcctcctgtag

SEQ ID NO: 21544 - DNA, 445 bp, Glycine max
  Clone ID: jC-gmro02800022g05d1
gggaaaaaagccagttaaatatatacacaattaaattatgggctaaaatgcatgtacaagtaaagtgaaacatacacactattttccaaaaatctgtaggcaattccttcatttcaaaaggggatcatagaacacatatctgggatctggaacaattagaggcagcttttttatgtacagaaacagcatcttacaattttctttgaaaattgtcccaacatcaacaatgtcactggtgtcagggtaaatccaaaggtccccaaagttggttctttttaggctatcccggcaaaaggggcaagactgagacctttgacacctgaatcaacaagcaccattgtcacatctagagaacaacaaactagggatcactttctgattttctaatggcaagggcaaatataacaatcaacttttacaaggagttaaggaatgttgggtgttg

SEQ ID NO: 21545 - DNA, 500 bp, Glycine max
  Clone ID: jC-gmro02800022g07d1
gaatatgatatattgaaaataggattctgttcaaaatgttcctaagcatttaccactgctaaaactacaaggcaggagcttataataacaaaagaaaagttgtgccaaatatcaaccaagcatcatcatactaggcaccagttatagatgttcacccagcagaactcaagccaaatgacttgacaattgtgctcactctttctgcaaaagttctggaggttatctttttgcctggtacatggaatgggtttgaaacggcatctacatatgcagaatggaacctcctgaaaaaattccttacatccgcatctttaacatccagattcgtggtcaccaagataaatttcaccttcgtattagtcagatattcatatactttgtagttttaaataggataaagcagtcccaaaaacgttttattaagcatcggtccagactttttaggattgttcactcgcttgtcgaccacatttagcgagctatggacgatgtggtggagc

SEQ ID NO: 21546 - DNA, 491 bp, Glycine max
  Clone ID: jC-gmro02800022g08d1
aagagcaaaccattataccatatatattaaagaccataattaacatcaaaatacctcatccaaatattcagattattctgcacaactcacaaaacatactaggaagggcgttcacaataccttatccaaatattcagattattctgcacaactcataaaacatactaggaagggcgttcacaatactttatccaaatattcagattattcatcaccaaaacccttgacaagcagtttttaggcttttttgcagacttttccatcacaaacccattcatctttggacttttcttccttggcatcatctttgcttccttctttgtcctccttttccaatgcacattttggatggagatcaaagtcacaatctccacagtaggaggaccatatatgtccctcttcattgcaagcattacagaaatacaccctgcggcgcgtcaacacaagctcatgctcatgtaattcatgcttcagcttctccgggcacccct

SEQ ID NO: 21547 - DNA, 223 bp, Glycine max
  Clone ID: jC-gmro02800022g10d1
aatgtgaggagcctgttgatatatgaaaatgcaatggaaggcagaagcgttttgccaagcaacataggattcaaatttacaagatattcattattgctaatcttaaaaaacggctatgacattcaaatttcactaccaaaattctttgaatatatgacattcaatacttaaataaaaaaacgaatgaatcgcattaaataaattaaatggaatgggggggggg

SEQ ID NO: 21548 - DNA, 452 bp, Glycine max
  Clone ID: jC-gmro02800022g11d1
gggatattagagtactattattaatgggacacaattgagttcaacacaaaccgaacttattttcaagggacattattacagacccattaaacatcaaagttcttcaaatgttttgggaacacattcaacattacacaacgagcttaaaaccccccacggtgacggaggacaaggtgaagggttgatttcttctggatgttgtagtcagcgagggtcctttcatcctcgagctgcttgccagcaaaaatcagtctctgctggtccggcgggatgccttacttgtcctgaatcttggccttcacattgtcaatggtgtcagagctcttcacctcgagggttatagtcttacccgtaagagtctttacgaaaatttgcataccaccacgaagacgcaacaccaagtggagagtcgactccttctggatgttgtagtcagaaagggtgcgttcgtc

SEQ ID NO: 21549 - DNA, 478 bp, Glycine max
  Clone ID: jC-gmro02800023b03d1
aaattcccaagtcgtattcaaatccttatcaataaaaccatgaagccaaattaaaatatttgtagtacacacccaaaaattcttcaaaagaaacttccgggaatctagcacgaccaaaatcataaattaatgaaattctaacccatcgataattaaatttgatgggaattatgatgtagcagtagcacacgtttcaccattaaaatcaaaataccaggtcaaagtttcaagtaacttaggacagaacgtaaaaaaaaactagataaaatgagtagatagctcggtacattaagtcacttagcacttgacctcctttaaggcatatgcaaagtacaggaatgttggatcagcagcgccgtccttgtagtaggcaaagaccaagcaagcatcattacccatgctctcaccaacaaaaaattggaaatctttaatcttagagagcagggatttagttgctccctcgatgtgctttttaaac

SEQ ID NO: 21550 - DNA, 401 bp, Glycine max
  Clone ID: jC-gmro02800023b06d1
gaaatataaaccaggtgaaaattgctattatgggcaactgctcacaatttgatactttatgatgaaaaatacatttttaacacatctcatcttagctctgaatctctgatcattatgcttgagttgaagcttatacctatagcagttctacttctagaaagaaactaacgaacttggccataggcagatcttggcacatgatgtagtttcacaaatttacgaaaagggagcattattctgagggaaacattggggggaaaaggtacaagtctgatcatgtcaaattatgcaagtctaggaactaactgcgccattacattacacaggctcctccaaattctcctgagctttcttcctgtactggcggttcaccttctgggagctctttttaatgtctttta

SEQ ID NO: 21551 - DNA, 472 bp, Glycine max
  Clone ID: jC-gmro02800023b08d1
atatagataacttgtgtgtaagcttaattgaaaaaatagtataacaagttgttatttactagtatacaaacagaagcatttgcagggcaggggaaaaaaaatcgaaacacaatacgttttttcaaaccggccagccaagaatacatatgaaaaaagaaagatttgttctcttgctcaatatatatgatcagagagtgacactgcggagcacaacagtctcaacggtgagtccagggccgaaaccaaatagcacaccccagtcaagaccttcaccggttgtgccaagaccattttctattgatttcttcctcatttgatccaagatgaatagcacgcatgcacttgacatgttaccatactcgctgagcacatgtctagtagcttccattttttcaggctttaggcctaacttagcctcaacttggtccaaaattgcgggtccaccagggtgtgcattccaaaagatagaatt

SEQ ID NO: 21552 - DNA, 495 bp, Glycine max
  Clone ID: jC-gmro02800023b09d1
aggaataattgtgagtcgatatcatttcacaaccaagcaaatactccgtgcatgacacggaccaaccgctagtattatattgacaaaccctgaaccatcacaatcacactatctgcatattacaaatataaactgcaaaaaaaaggagtaaaggggggaataaagctacctatacaaccacaccactcagaaatgccgaaagagtgaaaggttagtccaagttaattgtcttccattgcctgccttcttagccggtctctctctctctctctctctaaccagagaacataacactaggtcagaagatatgcataccgaatcctgcaattgtttttcttatcccaatccatggctaatatcagtagtaacactggtcctcggcatgccagttacataaccttacaatcaattggacaaaaacacaagggaaaaaacagagggtagaagaatgatgcctatgaaagattactcccaagcaccaccgtaatagactaa

SEQ ID NO: 21553 - DNA, 316 bp, Glycine max
  Clone ID: jC-gmro02800023b10d1
aaaaccccccaaaaaagtttaagggaaaatttttataaagggggcttttaaaacaaaaatgggggggggtgaaaaaaaaatcccctttgctaatgattttggaaccccggtaggaaaattaaggggttgggtcaaaattggggggttttttaaaaattataaaaaaacgggggggggctggggaaaaataaaaagggtgaaaaaaaatggggaccaaaaaatataaagggtttgaaaaagagggggaggaaaatgaaaaattggcccaaggccttttattgggggtgttttggttccaaaaaacgcggggggaaaa

SEQ ID NO: 21554 - DNA, 436 bp, Glycine max
  Clone ID: jC-gmro02800023b11d1
acaacaatgaatttatgtacaaaaaaaaaaaagatggtttttaacacgagacaactggcccaggtgacacagggttaaaatcgtctgatggaaccgcttccattatctccactttgaaagtcacagtctttgtagcgatcatagagtaggagttgtcccaaacaagctcgtattttccttcaggaaccatgatatgactctcgtgccatttgtttccctgatatttgaaatatccacaaacgtcacgctttcccttcgtagtaatcttggccacagaaaagccaacatctgaagaaactgttgggaactgccaatacaaaatggtgtcctctttggtctctatttcaacaacatgctgttgcccagctcgaatacaaacagcctcctcttcttctggttttctgctcggatctccatagataaaggttcccccgtc

SEQ ID NO: 21555 - DNA, 423 bp, Glycine max
  Clone ID: jC-gmro02800023b12d1
agcagcaatcattttactattaactaattaaaatcataatgtgttgatcacttttttaagggcatttgtgacactccacaatcttgaaaatcttcccagcgggatacaccccaaaatcaaaagttatcatgcaaggatatgtttggtgggtctttccaaattcgattatctacatcatgaataactatgggggttgattctgaacagagacatcattcagcatcttaactgggtatttggctccactctgtttaatgctaaagctttcttaatctagctcatacaattgtttggatatgcatgacatttgggaaatcaaagtaaatttgacttaaacgagagtgcgtgtcacaatttcaagaagacaggcctctggccatgggcctcaggacttatatattcacctttctagaaatcgctaat

SEQ ID NO: 21556 - DNA, 463 bp, Glycine max
  Clone ID: jC-gmro02800023e04d1
ccagcaaacagatagcaaaatccatagaaatttgatgcgataatttcttactatcatttcattcgatcgactataaacacaactagaattgttggtcaaaaacgaaaaccacaggaacacgaaacgaaaccaacacagataccgaaacttaaaccacacacagacaacaccttaaaataattgaacttaatcataaaccctaatttacagggtcatatgcctaatttctccagtttccatcggatccaccgccttccccaccgggagagtagcgagaaccaccatcaccaccgtaaccacggtctttaccaccggcgtattctccacctccacccccaccattacggttgtatccaccttcacgacgaccaccgtattcgccggcgccaccaccaccaccatatccaccgctaccgcggttgtatccaccaccactttcgaaaccaccggctccaccaccacc

SEQ ID NO: 21557 - DNA, 554 bp, Glycine max
  Clone ID: jC-gmro02800023e08d1
aacaaaagtaggcatgagttatgccttgaaatccactaattaatatgctacactccaaagtccaaaatctaattaagccataactaaatttaagtacagtacagcccaatcatgtacttatgtccactagcatctcattaccccttcatataacagtatccaaaactcaccaaactctgacctatatgtcctttgttaccacaaaagtaggcatccctctgcccttggttggtaggtatccttatttttctggtctggttggtaagcctaaaatctaaatgggtgctgtaggatgaaacctacttttctgattcggacttcaagtgcggccagataatttctgttgagaaaagtgaggctaaaggcccagagatcttaaagaacttgaggcaattgcttccacctaacctggaatgtaaaattacattttcgaattaatctttctggaatgtaatttacattccgaactaggtggttcataaactaaaaaggtacacgaagccattatggaggcgaagaagcaattgccaaaactggatttgaactttgaaagg

SEQ ID NO: 21558 - DNA, 508 bp, Glycine max
  Clone ID: jC-gmro02800023e09d1
caccaatatgatattaagagaagaatcagaagattaatcaaacaaaacaagtttccctagtacattcataaaagattggagtacaaagtaacatataacataaaccctcccatttcccacaatttataccccatttatgtcaccaactattatgagaaagttaagcaggaaaagaaaaactcttacaaaaaataataaagaattaaactgactgcctcaacatttgactggtattgcagtgtacttgatcaatgatctattttacgccaaagcaggcatgtctttgagccatggatccagtggcttaccaattgagtaaactatgaagccaatctcacgcaacttatcagcatccacaatgtttctgccatcaaaaacaaatgctggtttttgcatgttgccaaatatcctctggtagtcgagagtcttgaactcatcccactcggttagaatgcaaaggccatgtgcatcctttgttgcttcataggcatcccatacaacactgtcc

SEQ ID NO: 21559 - DNA, 450 bp, Glycine max
  Clone ID: jC-gmro02800023e10d1
aaaaaaagagggccgactggataaacttttttcaatatcaaatcaagggccagcctattttaaagattttgtttaaaaacatagctttaacttcttgaaatgctgccaaattttattggcaaaattttacaacgaactgcctaaacaaatcatccaacatgaaagttttctttttaagagatgcctatttatgtgaaaagctttcgtaaatgagccttttttttctcaagctatttcaaggcttccccgcgtaaccccagggattgttctttgcccaattccattggtccctgcacatcttctccacaccataggttgccttccaaccaagatttttttaaactttctctgtggaggcataaaccctagtcgcatctcccggtctttttggacattattctactggaatttttttgccataagccttttaattgctgcaccatttaagcc

SEQ ID NO: 21560 - DNA, 490 bp, Glycine max
  Clone ID: jC-gmro02800023f01d1
gttgatgaaactaaaacgaacaattttatggggttaatcatgctacaatgttttcattaggtaacagccttttcagctccaccacaaagaaagaaaaaaaaattagtgttttggcagcaaatgatatggggcaataaataaaaacaaaataaagcatggtaattgtaagaaggtattgtcacaaccaaggctatgtaacttgagaaatcattaatttctcactcaattgttgtgaatgaggagaaaataactaaaaccacagccactacatgaagtgctctgcaattccacattgcatgaatccaatgctatctcatagaaattggtcttgagtgagtccaattatccaccaaatattttaataaccattgatctgaggccttgatgtaggaccaacaagccgtgaaaatggaacttgtgtcctgctgctgttgccagtgttcagacccctttgacctgaaaacctatcattcacttttggatctgatac

SEQ ID NO: 21561 - DNA, 484 bp, Glycine max
  unsure at all n locations
  Clone ID: jC-gmro02800023h04d1
gagaagtgacacattggccaacctgtgcatataccaataaccagaatgtgataagtgacaaaattccagagtcaagactacagcaataactatatatgtaacaaaagttgaaaaaaaaatgatttaaagaaagacaaactggcctcaagcctagccagttcagacatccaatcctctccttccaaatgctcgagaatggattgggctcggtgctgttgcagagcagtcacagtcaaacacttgatgcccatttctctgattctaggcggcattatcacaccaactgtttcagttagatatctacacaggaaaaactttatttgcaagcgacaataagggagcagattcatacaaaacaactgcattagaggctctgatcgctntatcaagtcagaaattaagaagcatttcagcagcaagggtaacatctctgctcattgtccatggctcaacactcaaaaatatccccaattttccgactttt

SEQ ID NO: 21562 - DNA, 523 bp, Glycine max
  Clone ID: jC-gmro02800023h06d1
aaaagaattaattatttgcaattctagaagtggagctcagacatacagggtaacatacatatttacaaatgcacctaatatggtcatgaactgatgaaagaaaaagtaagacaataagctccaaagctgaaaaaaaaaaaaacaattttacaacagcttgctatttactctgtcctattatacctcaagatttgattgagattttcacgacagaattaatgattcaagtcaataccaagaaagccggtaggatttcttctgcgatcgatcggcaccttacagagaagcctacttgaattgaaagcctgtttatttatttttcctgccccgtctgtatcatatgcttagctcattctaggctcttcttctattcagcatctttcgggcaagccaagtcaattaaataaatttacatcatatatataaatgcaaaggaccattctatgtgaaaattcaatagcaaagtgtctgtccattagtcacccagtttacaaatgtatcaggaaattcctttagaactttg

SEQ ID NO: 21563 - DNA, 537 bp, Glycine max
  Clone ID: jC-gmro02800023h08d1
actcacgaaaatcataaacatccattcattaataatattcccatgcatcacattgagcacttccaaatataatttaacacacttcaagatatcaccgacatgcatatccaagtttattttccatacaaaggaaggatctacataactaagcattcttctcgtcaaacttcacaccgattttattatacatataagcacttatccaaaggtcaagcccattattttttagtgcataacttttagagctagctatgctttgagaagatgaccatcaatatctttagtgcatttgtgcaggtattcaatgtggccatatggaggatcaacctcctcacgaagcctctcgtattcaacggtccatttgataatagtaccgccatgatcattatcatcaatggcttgaaagatgaacttaaagttcttataattatgatcaatgtcaccactgaagagcttgtaggtgattgttttgctctgttcatcaatggattcaatactctccagacatgttgtaaccttaccatctatggtataagt

SEQ ID NO: 21564 - DNA, 514 bp, Glycine max
  Clone ID: jC-gmro02800023h09d1
gaagcaggcttgtcaagcattgcatcatacaattaatacagtacatactattactatatgatacaaatattgcccctaagattatggtgcacttatcaccgtcatctgttgggaatgtggggacacaaatctctaattattacaaagctataggaatgatctttgcggacctcccaaattcatccattaacataaacagtttttccacatcaatttcatatctatattatccaattgcttttgtggtttaactattaggcaatttgttcagacaagtacatatctaggaacaggatttacaatactattaattatataatattgcaagcaatgtccttgttgataacgatatatcgatcatcttggagattttaacgattccacatgagattttccgcatggtcctctcaatctaatgaagagcctgtattcatcaaaggtcatgggcgtgtagagtgcaggtttgtctggctttaccaattcctttactgggtcaatgggtatgtcacttttg

SEQ ID NO: 21565 - DNA, 309 bp, Glycine max
  Clone ID: jC-gmro02800023h10d1
ggggaacgggtttcaaggaaaattttcttgtcttttcacaaaaaaccccaggggggggggggggccccccccctccggcctggttggtttcttggggtgcccaaaccccattacgggccccccgccttttttttttttccccaattataaccccggaaaccctttttttttttttggggaaaccttgtttcaatttttccaaacaaagatgttaaaccccccccccctttttttttttaaggggcgccccccccccatcccgattgtgcccctcccccccccctttttgtcgaccccgcccccgtgggg

SEQ ID NO: 21566 - DNA, 494 bp, Glycine max
  Clone ID: jC-gmro02800023h11d1
gtgggggcaaagacaatctacaatggattagaaacaacaaatttgtggaagaaaatgtattttgtacgagattttatacacaaagtttggttgcaaaacaggcaaaagcttgacattaagatgcacatctcaatttatccgtggagtgcaatctctcaagtaaaagctgtgtgtgtttcccagttacttcaccttttcaaggttagtccattcattgacaatgacaaagggaggcaaactggggtttttgtcacaccatgtcgccatatggctttaaattcaactagtcgtggttattttggtgccattcattgagttgtatgctttgcagtgtgggatgtgctactcaacaatcaatggcaaagaacaaaccattgccctcaatctccgagacatctcgagtccaactagcttcctcatgcagctatgcaatgcaagtgatcatgaatgagaaccaccagtctttgcccatgtcagctactcactgagtttga

SEQ ID NO: 21567 - DNA, 452 bp, Glycine max
  Clone ID: jC-gmro02800023h12d1
gcttaattaattgaaatggattggatcggatcgaatcttactcgtgtacaaaaaaacattgagggggcaacatacatgccacacaaatataaaaaaaacttgaatcatcattatcttcaccattcatcaatttaaacaacattatcatcatcaccatctccaaaacatttcttcttcatgcttattaaaagggcttccttcttcccccttcttgtggatccgctcaattgatttttttttctttctttccatcatatcattcattcagaatcactttccatgcttcccatagccttcaaccctcttggtctcttcttgttacttttcttctccctaacttcatatctctcttggcacatatcagtcaaccacgccccgggactcaccataaggaagcttctttgaatgattttggccctctttttgggtcgctgaggaagcttgcaaccctt

SEQ ID NO: 21568 - DNA, 526 bp, Glycine max
  Clone ID: jC-gmro02800024a02d1
actaacaacatgtaaattttattttacagaacaaaaaaagtgttctacataaattttgtgtttccactggtctaaatgatgtaaatttagttagcattgttatttattaaagtttgaatgattagctttaataaaagaaattcactaacatgtattacaacactcaagtctaatatgtaaatttaagaaaaaccgttggtataatgacgtgtaggctctgaataaaatatgttttgtttgaagaagaagcttccctgtcgacgattttgaccggaaatccacctttcattagggaggattaaaaagatatgaggtgaggctcatcccctggagtgagcactggaaccaccgtgaacctcctgagaataccagccaccaaccttttgatttgcataaaggccatttttctttcccaacatattctgggaccagcctgattcaccgtgttagttaaggaattcctttccacaaagtttcactttcctgtttgaagtttttccaaccaccttttttggccttaaccgaa

SEQ ID NO: 21569 - DNA, 468 bp, Glycine max
  Clone ID: jC-gmro02800024d02d1
gccagcatacatttagataattatatatcagctccacaaattgataacaaacagtattaacattaatgggacaatagagttcaacacaaaccaaacttatttttaaaggtcatttcagacccattacacattacattttttcttaaaatgtttgggaaaatccaacattgaacatcacacagaaatcagctccagcttaaaaccccccacgaagacgcaacaccaagtgcagagttgactccttctggatgttgtagtcagcgagggtccttccatcctctagctgtttgccagcaaaaataagcctctgctggtccggtgggattcctttcttgtcctggatcttcgccttcacattgtcaatggtgtcggagctctccacctcgagggtaataatcttacccgtaagggtcttgacgaagatctgcataccaccacgaagacgcaacaccaagtggagagttgact

SEQ ID NO: 21570 - DNA, 547 bp, Glycine max
  Clone ID: jC-gmro02800024d09d1
agcaaaacgtaatcatttggattacagtccatggttcaaacttcagagttccagagacaggaacctgaatctacttgcaaaaaataattaaatgaaaactgaataagctcagccaatgttttacaagaatgaatattataatttatggcaataaactggttttgtgctattttggagctagctttttctggcaatgtcttttcctttttcagaccaacgatgcatgtgcaatataggagcagaaaaaaattattgaaagaatgatgatactagaacgttctatcacttaaataccaaattatggcaggttttgtcacaagggtaaggacagccaatagcctggacactaactcggccaaaataccagttcccaaccgactccgcgatccccctatttccaatacgaggggaatcatgagcaaaccatgtatcctgtctttctgattggcaatgggcgaaacatgaatttatgaataacccattttataagaccgtgagaaggctcttgtagatctaagcatctgatttcgaaaaccttgaagatact

SEQ ID NO: 21571 - DNA, 516 bp, Glycine max
  Clone ID: jC-gmro02800024d11d1
ctggtcaccacatattatctgctaagtttgacttgaataataaacaaaaaaaggtatggtcctatcccaatagaaatgggatcaaatgcaaagatgcaatgtacaccaccacatatgaggaatagagccaagtctgtactggaaattaaattactttgatacaacagaatcaatagctctttccaacaatacaaattatttaaagttcttacaggggaatgttaaaaaacaaaagcaagccatgcttatcctcactgttttgggagtattaatctttttctctcttcctactcaatgtacaaaatgcttagtgctttgtgaacctctcaaggacttcaaagtagtcgggaaatgtcttcctggtgcaaccaggatccttgatggttactggaacatccccacaagcagcaagagagaatgccatggccattctgtggtcatcatatgtgtctatagctgtgacattcaatttctcaggtggagtaatcacacagtaatcaggaccttcttcaactg

SEQ ID NO: 21572 - DNA, 422 bp, Glycine max
  Clone ID: jC-gmro02800024e01d1
aagtatatcaaaggttcctcgttcctccttttctttatcttccttaggggatgtgtatggtttgaatgtgaatgggtagggttacctcggcaaagtaactgcaaaaagaaaactttaaatgtactttcaaacaaagaaagtggttcaattctattcaatactaaaaagtaaaaactaaaactaaaaacccatcccacaaaagcacaaacaaattgagtccaacaagtcataagtctgaagaaatcatcatcgatcagtagtacgtgactctttcttgtgtcttcttgtcatcaaacaaaaagttgttgcaactgttattagtgctaatgagctgtttaatttccttaagaccataatccaatggattttgttcccacaataatccattttgtttgcctgtccacccactaacactaccacca

SEQ ID NO: 21573 - DNA, 452 bp, Glycine max
  Clone ID: jC-gmro02800024e02d1
aacacctaaacacatttattaaacaaaaataaagaccatatataaatcgattggtttatttatgcctgtcggcaaataaatatataatgtaaaaaaaaaaaaccacaaataaagatctaaaaaattgacactattatatacatctcaatatcaatcatcacatatcaccctgatcggtatgatccaccggagttgttgtacggcccctccgtcgagattgccggtggtgactgccgccaaatttcaaccttccggtctccttaaacctttgtttcttggagggtacaatgacacactcgggttgtggcacagggtaccttaaagtatcatagcaatttgaatagtacatgtaacgctgacggaaccgtcgcatggtgaggcggtgcatgggggtcacgccggcttattcttgagcctcgagatcggcgtgttggtcggagcaagacttggtg

SEQ ID NO: 21574 - DNA, 123 bp, Glycine max
  unsure at all n locations
  Clone ID: jC-gmro02800024e05d1
atggaatgtcacaccgttgctcctttcaggaancccgactggaattaatttcccgggctcgacgcagctcactatgtcggctggcccgcccttattttttattttctttttatttttttgttt

SEQ ID NO: 21575 - DNA, 446 bp, Glycine max
  Clone ID: jC-gmro02800024h03d1
caaaacatgagtccatcttatatgcacatgaagaagactaattaatgagagtggtctctgaaagttttcccctgataatgcttgtgttacatagttggaatagatacaaatttatttgtaagcatagccgcaggattgaaatgaagtgtctaaagttgaactaatgaacactttgaagtagtacatatgaagggatgtggtttctccctgataaaaccatttataaagaaagatgaatgttcctatccattacttattatagctcctctttggccactggtttaatcactggaaacttgtttttaacccagtccacataacctcctcccatgtttttcacatttttaaaaccttcatacagaagatcagcagttgcatacagagatctcaccccactttgacaacccaaaaggagatgatcttttttgttggaagctgatgaaacc

SEQ ID NO: 21576 - DNA, 480 bp, Glycine max
  Clone ID: jC-gmro02800024h06d1
aaccataacaagctgaaatatccatattcataaattttacacaaagggttgtcatcatggccccttacaacaacaaagtactacatctaactattctttaaaaatctaacacgatgattcaaaggacgccctgttgtcatcaggagaacttatattctctcttgcacaacaaccaagccccctcaaccaaaacaattcccacctaaacacaaactctaaaacatgttaaacaattaattagcttctatataacataatcagaccatgaagtatggtccatggtaaaactaggcatcttattccaatttaatagggttattcttccctccaaccaacctagcagggtttcccaacagcagtagtccttggtggcacttccttcacacaacagaacaagcacctatcttagctccatcaccaattttaatgttccccaaaatacaaggtccctgcacctatcaacaccctatcaccaatctt

SEQ ID NO: 21577 - DNA, 527 bp, Glycine max
  Clone ID: jC-gmro02800024h08d1
gatgctaatatattcattcacaatacgatacttgcctatcacaacatgttgccaactacatttttttttttttgctgtacctaattaaatcaatctgcagtttggcaccgaaaatgtttcaaaaccaaaaacatagccattaaaaaaatcgaaagaacaaattaatcttcatttgtaatgaacaaaataatcagtttgctctgtccaattgaagaggcctaggtggagccatggttcttctcttccacaggttaatttctattcggggcttcaaattaagcacacccccatgaccaactccaacaccaaccaaaaggggtgcagaaaaagggataataatctgttcctcttcatcgccatcactatccactctgtaatgatccgaatagtaatcaatttcctcttcatctggcgccacctgagccaccttccaatcaaaatcaccaagagcgtcacgtccacttgaaaaccttctcatctgactcacgcgcggtgcacgtgctgcgtcagcaagagcacgatccttg

SEQ ID NO: 21578 - DNA, 512 bp, Glycine max
  Clone ID: jC-gmro02800024h10d1
aattatcacgaatgttacaattcacactcgaagtggggctaataatccattaccacgatactccatataaacgtaatacagaaaaacaagttatcgattttattgaaatcagaataattaatctgatgaaaccaactttgataggcatatgcttataatggttgaaaggtgaaattggaaagtcacacaaacacacatgaaaatacgaatacttatcaaagtatgaaatcgacttagacagtcatctgcttatggttgcaaggtgatagtggagagccacacaaacacttgttgtgagagtacaaagacttatcgatcttttgcaattctccacccttcggtatgagaccgcataactgattatagctgacgtcgaatagctgaaaatgttcgactttggtcaaccccacaggaaggctcccataaatcttattgtggttgagatccaaccttgccagggtcttgtggggaatctccacgcgagaaaatcaaacgcgataatgttccttgaa

SEQ ID NO: 21579 - DNA, 521 bp, Glycine max
  Clone ID: jC-gmro02800024h11d1
gacagaaatgcaagatagattactaattccagagaatagtcaacaccaaagcatatagaagtaacgatttcaaaaaaaatattcccataagaaaaagtttgacaacacaaaattgtaaaatccaatctgaacgagttaacaaaaaaggtccccaaactaaaccatcaaggtactcgttgttttcaacatctactcttccagtattgttcccttctcactaacataaataccatccagaaatttcctgatatccttgtttttaacatggcatttctggttaatgagagcacaggacctagaaacaagttcaatgtcgtttccatccaaaatcaactcatctttaactttttgagatcgaacaacggacacgccatcaagcatgtcgactttcctcaccttcttctcgccaaggaaatttcggatctcaatagacttggtgctgttgccgatgcttgcgttgatgggaaaatgggcataaacgaacctcattttgtagcggtagcccttggtgacgccggtga

SEQ ID NO: 21580 - DNA, 496 bp, Glycine max
  Clone ID: jC-gmro02800025a02d1
actcttaacacatacgccttgcataaaattatcaggataataatacaatctcaaattactttacaatcttattatcaatatagccaacatagcatacattatatatacgcaaatatatatatgaagtaacaccataggcataattaaacactcttcaagctcgcacagaatttattcaaaggcacactagaaatggaagatatgatagagatacacaggcatggtgatactttggagcttgaatattaattatatatgaatatttatcatgttcagccaaacagatggtggtgcttctttccatgagcttcctcatcttctttcttaacttcctttttctcatggtgttcatgcaagacaaaaccaccagcaccaacagtagctgctgccgcaatctcctcttctaccttgtgcctgtgagcatgctctgggtctttcttggcctcatgcttctcatgcaaggcataagcaccggcagtcgcagcaccaagttccc

SEQ ID NO: 21581 - DNA, 519 bp, Glycine max
  unsure at all n locations
  Clone ID: jC-gmro02800025c07d1
aaaatcttcatgtcacaaaagtgcaatggatcaaaatacaactttctaaataattctcaacatatgcatatatatgctaaacacgaagggagtgtctgagtgatgagcttttttcacgcaccatcatgattttgactcccatcaggccaacaaaactgaaatctaatttacatctcaaatgaacccaaagaaaattgaaaaattatattacgatatcaccaagtaaatattattccatttgatggattcattaacctaatctatacagaataagtatctttagaattttaaattttaattaaaaaattctaaaaattatcctttgcttgccggataacacccagggcttctgcatcatctgccgtggctgcaatatttagtttttgccggatttctatgctccatgtgcgaaggaatggattgcangcctttttcactttcagcgtaattggaatcgtgggcaagcctttatttctaaggttagatacatgggtagcataggattgaagttccttgttt

SEQ ID NO: 21582 - DNA, 315 bp, Glycine max
  Clone ID: jC-gmro02800025c10a1
tagagggctcatgcaagttctctctctctctctctctctaacacggagtgatggctgtgcagctgtgggaaaccctgaaggaagccatctgttcctacactggcttcgatacttacaccttcttcacggagctggcgcttctagttgacggtgactacgttatgacggatctttttggctccttcgacgatcaccatcacctcgaccgacacatgtaggaggaagaggagatgtcgcctgtgcgcctcccggttcagctaaggagagatcacgatggaggagctcatggcctacgactgcaccgatcccgagaag

SEQ ID NO: 21583 - DNA, 525 bp, Glycine max
  Clone ID: jC-gmro02800025c12d1
cacaacagaacatgaaccattcacttgttgatcacttcacactgttcatggctgaaactgaaagcccaacccacacaaaattcaaacactttctggattttacaaaactacgttccagttccttctctagttatccccccttcttactcaattttttttcccacccctttgaactacaaaaactaaaatttattttaatgttttaataagcaaccctagaaatatgttacaagttacatgttacatcatcaaagcctcacggcttcaaacgctactccaaacctttaaacatttcaccccctagttcagatcatccaccctttcgtttaaaaaaatcacaatcgggtcagaacttcaaaccgggacgggcttaaagttaacggttacggtgagaagacgagaaagagaatattctggataataataaggtgagaaagagagactgtaatatggatcatttgtcggggttcgacccgatccaaatccgggacagcaacccgactcgtttttattcgagccggagca

SEQ ID NO: 21584 - DNA, 551 bp, Glycine max
  Clone ID: jC-gmro02800025d02d1
aaaccaaggaataggttcatagggctcatattggccacctcctgtagcaatcactaataaaaactaaactcatagattgggttccaatgtggaggaaaaacaaacatgaaacaaggaaaaaattaacatacatagttgattgtacatattaccgcagagaggttccaggatgactgaggacacgagtctacaattattcaggtttaaggactacatgcattaaacaagactatctaacagttatttatccatcccatcatgcagactttttatacatgccattggcgccatcagaccatctaagaaaattaagtgcgtacaaatgacgaacgaggatgactttaacaccaggcttatgcatcctaaatatagcaagggcatactctaatcattagctttcccagatgaaccttacacttacattatttttctcattcgacttgagaatacataattgatcgctaaaagctgtttttattcatgtaatgctgccccacaaacaatttctatcctctactttattgggatgtaacggttcgatacatgttttg

SEQ ID NO: 21585 - DNA, 511 bp, Glycine max
  Clone ID: jC-gmro02800025g03d1
attgggaacttattggacaatgtattcacctagtgttttctgatccttggagaaaccttttgtgaacaatcataaatgatcatgaaagagcagatacaatatctaatgatgtttgacttgtgtcttattcccaccagacaccatagatgggggagataggaacattaataatgaagaaaggtttaagcacaacactcattcctcttgcaccaaaatcctatactgcacacccattcgggcaacttcttagcttggttcaattttgttgagaaatcaggcaacaacacagaacaccagttttttatagttaaaattaaaatagccaatacccttaaccaataccacagtcaattaaatttaaaacagaacaatcttttactcacaacaagattatcattattttcccaacaaaatcatgctaacttattaggaatcctacctttaaaacggctctactttttagcagaagcttggaagaaagcaaacaattatttttaggaggcaggccctc

SEQ ID NO: 21586 - DNA, 329 bp, Glycine max
  Clone ID: jC-gmro02800025g05d1
gaggaaaaaaacacccccacgggtttgggggaccaacccgcaaaatgttattccccccctacaataacactctacctggggggagggggtggctaaccccccataaataggggggttatccaggggaaaaccccctatcccgggggggggggtaaaaaaaacaaaaaaaaattggtctgggccaaggggggaaaaaattaaaaatgttgcttggggcgaaccaagggactccccgcgggaaccctgcgctataaggtgggcacaccataaaaaaaaaccccttgggctggggagggaaaaaatgggcgcttttttaaacccctttttac

SEQ ID NO: 21587 - DNA, 479 bp, Glycine max
  Clone ID: jC-gmro02800025g07d1
ctaatgagttgcatttctttagggactttagttgggtaacaaagtaatatcaagattggaattatttaacgaaacctaacatatagtaaaaaaaattcttgctgttcatttgaagtacaaatgtgattcatgtggctgagtaagggcttgtgtgggccgaaaactacgtcgtaacaaattaaaatgggcccgtcattgctttatttcgtggattggttcattgaacgtttggataccctacatctttagctgaaaatgaggaccaaaattttcaccttcttgttcttcttcttcttcccttttctaaaggattaatctaaaacccccacgagttaagcccaaagaattccccacctatttaccgatttaaaagattactactattattaatcgataacagggtttaatttctgaacccgaaccccaccggttgaaccgggtacttaaacccaaaagtggtaaccgaatttgaaacccct

SEQ ID NO: 21588 - DNA, 483 bp, Glycine max
  Clone ID: jC-gmro02800025g08d1
aattatataaaatgctaaaatggtaattacgaacaactaatttcaaagagataaaaaaacaagcatacgcattaaacaaaaagtttgctaaactgctaattaagttccataatgtcaataaagtaaattactagcaactgaatccagcatcttcaactcatttcatgaaatagaagtaaagttgctcttcaatgtcatcttgaagatattaacttattccaaggttcattgatggatggaccaatccagtgaaaggatgaatgcctacagccacatttgctccttaaatcccaggaaaaatattttcaatttgttttagaaccaatttttctcttagcaaaagatggcaaacagaaagccgctgtttgaatctcagaattgtaaaatttcaatggtcttgactggtgactatcattctcacttaaaggattcactgggtgcttgaaatcaacaagaggacctttagttgagcaaagcataaaa

SEQ ID NO: 21589 - DNA, 495 bp, Glycine max
  Clone ID: jC-gmro02800025g11d1
aataagtgcatgcttcacccaaacacgctaatgaagcctgtctcacttcctatgacaaggtttattgagccagtcatcggcatgacatgagatgaaactaagatttcataatacaaagcattatatgttttattacagccaaagctaacagtgatttgccccataacaaaaagcatacttcacctgcagttttggtgatttcataataaatagcataaaaccactcacttatgcataagttacataaaacaactcacacatgccaccaagacatgtgtttattacagccaaagtcaagtgacttgccccataattcacctatagtttctgtagacaggagaatacatgcagctttcagcatacttgacaagattctgaggacgagggagacgagtagccaagcctagctcatatgccttgccagctacacttgctgctatgttagctgaaatttctctgatgttagagaatggcggataaataagcccttttcgt

SEQ ID NO: 21590 - DNA, 510 bp, Glycine max
  Clone ID: jC-gmro02800025h01d1
agaagaaaaattataaagtaatgacatgtcccggagaaacgaaattcaccacaacataatctaaatgaaaaaatattatgatatacttcatgctagtggtgtgtaacttccttcaattatttaaggcactattctacaatgagtacaacatagttacatactgatactagtttagtcactactcactagaagttcaattttggcgaacacccctaaggtatctaaccttttaacttggctaacagctgcgtaaatacaagaaatttgtacaactaaagcattatatacatgtgcctccaggctccaatagctcacccattcccttccaagggctcaattgctgttccagcagtatccttcataataatagcatccagtttccttttttttttttttttactaaatgaaagaaacctttgactgcaataaaatagtgaggtccgcaagaacggaagcaaactatctgaacttggggggtcatgaattgtcctgaatgagcttaagttccct

SEQ ID NO: 21591 - DNA, 531 bp, Glycine max
  Clone ID: jC-gmro02800025h02d1
gagaaataaaatgcttcagcactgtcactttaacacaatgcatgtgctccgacataatccacaaaggcttcttagttcgcccaatacatcatgtcatacgtgtgaaactttacatccgtgaaatcaagaacttgaaagatcaaaatccttctacttcaactatagacagaatgcccctacatgaaatcacagaaaaaatagaagaccaacttgaaatagctgtaacacccaacactaaggtttacaaagcgagaaacaaattttccactcatacagcacataaatgtaacgcttgatgagtcctcatgcgagagcacccacaatcctgattgttcttcagggataggactggtcagcacatatgaacaattttttgtaaagatttttgctttattttttctttctggctttgctgcatacaacctgtacataatgagcacaatcataagctattgagcacttggtgcatctctcatgcttaaattcagactgttgcgcatagtttttctaccaattccagcggtgcctttt

SEQ ID NO: 21592 - DNA, 456 bp, Glycine max
  Clone ID: jC-gmro02800026b04d1
gcaaacaaaagatatatcaataattaaaataactggtgaactcttttttgcattcggggcaatcatataataatttcatgccgcaatctgcatcatagcagccgcgaccgcaattcagaactatggattgcactatgcaaatacagaaagagaaattcagtcatggaccttatacaacatcgggagtctaatgactctgacattagagaatattggccttatacgatacgactcttgaattgaaaggtgatatacagtgcaaaatacaataaaacacttcacaacaaagcaaaaaagttccccagatcaggcatgcaaaggacactttacatatcagacacaaaagatccaaaaacaattttaaaattaaacttaacgcaagttaacacctgctcccgatcattcttcaatgtcatcttcagagagtagggtcccggtggagtaattggcggcaat

SEQ ID NO: 21593 - DNA, 524 bp, Glycine max
  unsure at all n locations
  Clone ID: jC-gmro02800026b09d1
gaatataaaatgacctgcaatcattagccaaataaaattgtatcatggctcaggtttttctttctatatccgtcataaatatgccagataccaaattaaactacagagtaagtagcttgatacagggttatttatttaactgatttggttgcaattcaaaaactatagatatagatatttatttaacttgatggcatgtcattcagtggccttgcctttacgtctgctgctactgccggtttctaacaggtaacaaaccattgaatcaacatcgtccccaaatatgctgtaagcctcaatcgcttgcatgtaactgaatcccattgatagtaacatctgcataccgctactaagatcagaaccatgctctctcccatgttccgtcttgcgatcagtgcccgatgatcctgttgctccagaagatgatggttcagcatttgaggtagaggattctctattgccaagctgttgcttaaatgcactatctngcaggtactcagctcgagaaacttcatcaccatgcg

SEQ ID NO: 21594 - DNA, 358 bp, Glycine max
  Clone ID: jC-gmro02800026b11d1
aaacccaaaaattaaacttttttttttttggcctgtggacaaaaaagcaaaaaaatacttggggggttttttatgaacagtaaatttggtttattactcctaaaaacaaaaaagcaacccttttaggggggggcctccctataatctttccttaaaggggattaccattttgaaaagggggttatttaaaggggacaaaattaatacatttgaaacctcttttttttttgccaaaatttttaaacatttcttttaaaaaaaaaaaaaatatttccggggggccctggggggcaattttttttaggcccctgcccggaagggctaaaaattgggttcatgggaaacttttggggcccgt

SEQ ID NO: 21595 - DNA, 405 bp, Glycine max
  Clone ID: jC-gmro02800026c03d1
aagccgaataacgcattgcaccactcctgtattgtaattataggtacacatttcagctaaactacacgaaatccctccaaaccagaaatcatattaacatgaatcagttaaagaaactttaacactaatatgccacaactataaatacaacatgaatactacaacaggtagaatgatcttcaaaaaaggatctgtgatggcattagacttctagccggaaatctaatcagctattgtataaaagttcgctccatctgtttcactatctaaacgtatacccgattatacaaatcggtccaatgaacacctcctataattaccatgaaaaggggtgttcttgtatttggtccgatcacaagcacaacttttggatcttacatgtgtgaaactgaatatcttttttct

SEQ ID NO: 21596 - DNA, 520 bp, Glycine max
  Clone ID: jC-gmro02800026c04d1
atcaaaatatgttaacaatattatattattaacttaattataacaaagagacgtggaaaacaaaatgttgcttatactagatgattatgataacgaaacagaatagtcaatcgtcccttacgagaggaaaaacctataaggccgtctaccaactcaacatattgcactgtttttcaatgatatctctcacagcaacacaaagtgtttattccgaattcacactaaaataaactcgattaagataaaaatttggaacggtgtagcgatgatatccaagctcagactcaattctttaagccacggatgcaatgtggacaatcaaatcaatcacacgggaactgtaaccccattcgttgtcataccaggaaacaagttttacaaagttgtcattcaaagaaatttcggccttggcgtcaaatatgctagacctgttatcaccaacaaaatcagtagacacaacatcatcttctgtgtaacccaaaatacccttcaatttgccttttgattcttcttgatagca

SEQ ID NO: 21597 - DNA, 263 bp, Glycine max
  Clone ID: jC-gmro02800026e02d1
aaacacaaacccccccaagcttacattaaaaaaatcgggtttttttaacagcctttttcaccccttcactaaaccgggggaaaaagggtcataatgttgggtggagaaacacaagacccgccccccttgggaaatcctaccagttttttcccgctgaataaaaccatgaaccccaatgggatttttttaagacattaaccaaggccttatgcactgggtgaccaggggcccttctttgggaaaaaaaaatggggtggccggtt

SEQ ID NO: 21598 - DNA, 543 bp, Glycine max
  Clone ID: jC-gmro02800026e03d1
ataaagattattttcattgtgaacgcatcagaatctcatacaaataaaaatgggcagtggagatttggaaggtctgaaaaatgaaatatacggggacactcaattgtataacccaaaaaatcatttttttcccttttcagaatcggctcatctatttaagatgacaatacaagtggataagatgacaacaaaaaatgagtatgaataatgaactggaaatagggaaacaatgaataatgacactgctggctctcgtataaacgtgatctgacatacatatatttacttagaccaagcaactgcatctatttcagcttgtgcactccggtataactctagtttctttgcgagcgccactacgtcgttccataattgcaggatcctcatttaataacgatgacagacgcttggtctccattttgcctagctcggtgaaaaagtgatcacagtaacttcgttttgccttccgcacttgcaattgaacgatggactgggaaattgattccgcagtggtacccagaccttattgcctatgacaaaatt

SEQ ID NO: 21599 - DNA, 325 bp, Glycine max
  Clone ID: jC-gmro02800026e05d1
cagaataacttgtttcctttctcattctttcaaattttgatgctgacccccttttttccagaataaaaacaaatgtgatctgaatggagaaaatctaacgcaataaaatttacattccataggggggggggggggacctcgcaacaaatgaaaaaaaatcactcccagctacaaaaaatggggcttgtttctgtccaaaacaagcagtccccactgttccttatttaccatagcatttggcctttttgatctctatacctatgaaacctgcactccatcagtttgtgtacaaaatcagctgcaaataacaacattaatccccttt

SEQ ID NO: 21600 - DNA, 543 bp, Glycine max
  Clone ID: jC-gmro02800026e06d1
aatcataacaatgaatatattgaatcactataattagagcagcatcaactgagcaatagttagatctatgatacgacccagcagagccgaaattactatgacaaataaagggctaacaagaagcccataaaacatttttaaaacatttaaagaaaaaaaaatgagtaacaatgctatgcagtcaggaaaaaaatataaccagaaacttagtcaagatttctggcaaaaaaaatacttttgactagttagcattttcacaacaaaaattatgcttaaaaattacatataactgcagctgctctcagatttgaggtgaagaagcactcagcccaagccatggcatggactcagctgccttgttagaaggcccatttgctacttgatatggtgctgtcgaagcaattctatcctttctcttctccagaaaccggtggagggaagtttttctagcaatgggcagataaacaacaggtttggatgaagcttgagggtgcttacgaatggagcttgtaatgttcacactgggaataattggagcacttg

SEQ ID NO: 21601 - DNA, 485 bp, Glycine max
  Clone ID: jC-gmro02800026e09d1
catacaaaaacagatctcatatttcacatttgatcagaagcaacacaggatccatatctctataaaaactcacaattacatacaccacacaaaacacaaaattaaccattaaccaaccacatagaactgtttgttctttttttttttcccctcaaaggaaaaaacgaaaacaaaaaacaaaaactttcttcccaactccccctagtgtggtgcagcatactgattaataagcgagagagcattgctagtaacctgagcaacattgaccattctagccctaatcgcctccttaatcttcccattcagcgccttcccggcgaacccatcgccgcaagtgctctcatgggtcaaagccgaactcacccacgtctcaacgttgctgatgtgccacgtgaagtcctcacccttcaccttacacaatttgagttccttcagcgaccggctgagccggtcgacgctgtcactgatttcttcagcgcagtcct

SEQ ID NO: 21602 - DNA, 402 bp, Glycine max
  Clone ID: jC-gmro02800026f06d1
aaaccccaggcctaattttacattttgggggtatttttttgaaattggggataaaaaacatggtttagccccaaaaaaccaacccccgatttttttctgttctacaagtccaaaatacagctttttaggggaacatggaatttttccttaaaaaaaaaatctgaccccacttcaccgggggttattgggttttaaaatcttttgggggcggggtggggggggcttttgttttggcctatatcacctcaggggccccaaaaaaaattgggtacttggctctggaagtttccaaccaaaccccctgaaccttatttggtccaaactcgggtactccagggaagggggtttttctaaaaaccaaaaaggcatgtggcccccggtcaaaacaaaatacaaatcccc

SEQ ID NO: 21603 - DNA, 526 bp, Glycine max
  Clone ID: jC-gmro02800026h02d1
aaagaaaggcagtacgtattatttcaattgttaaataagaaaaaaaatatgatatcaatcaggctaacaaaattaaacatgaaatcaaagacaaagaaacttcaaacttttgaattgaaacaccatggcgataaaccctatcactcccaggaaaggaagacacatatttcctttttctccatttctgcactttgtgtcgaacttgagtgacacaatttagtagaaagtggtatggttgaacctaatccttgtacttcatttcagataccaggaagccaggcatgtcaaacaaggcagagaacttttcaacatcagctttgagatcttcaatagccttgttgttgacgagacccttgttgaaatccttgataagtttgccatgctccttctggatctccagtgtgagagtcacagcaccgtgaaggaactcaccaatgtgctcaaagtctttttaaaccaacccctaaaatcatggcaggggccccaattcccactcccccggggccaggcactgttataccaaaac

SEQ ID NO: 21604 - DNA, 249 bp, Glycine max
  Clone ID: jC-gmro02800026h10a1
ataaactatgaattcgagtctagaggctatagatctattagattcagttgtggaggtttttgcagctattctgtcggataattcctaggaatgaggtaaatggcatatttgaatacatgagaagttatatgagggagttgggaacatgtatttgtgggaatttaccggatgttatgaattctggatacctgggaaatattttaatggtagtatctggattaatttgttagatgatactatggttatctg

SEQ ID NO: 21605 - DNA, 443 bp, Glycine max
  Clone ID: jC-gmro02800026h11d1
gaatataaatcttttaaaaatactctataaatgtagtgtgccgtccgaagacacatacaaggaaaaactcaaagaaagaatcatatgattcggtacataacttggtaaacttaagcaaaatgaaatccaatgccactgtaaattgaaataaccctaaggtgtgttcgctgcccatcttcgcaggataataatgtgcaccacaaacatgaaataaaaatcacttccacaacttccgcaatgacatgtttttttcagtctcctttttcatcaccttggccacagccatctcaaaatccttctgagttacgtgtaccctccgctcccttaatgcaaacattccagctttggtgcaaacagccttaagttcagcaccagatgctccattcatcttcttggtaatcttcttcagatcaatgccacgcattaaattcatttcttcttga

SEQ ID NO: 21606 - DNA, 549 bp, Glycine max
  Clone ID: jC-gmro02800027a04d1
aatccagatgaacaagttaaattttaaacatatcacacgttttacagggtacaatgaacacaattcaattttgggttgggtacctttactacattatgccgttcaaaaaaaaaaaattcattagtacacattataggcaaaaaaccaactaacaacagaaattgtctagacagaacttttatcaacccctaccctgagccgcttatatattctttcatcttttcatataatgctgtagaagactatagaaaaacccgcataaaacaaaaagcatgacacaaaaaggtggaccgcacatgataaagtatacttaacaagcacattcacttgactgaggttgagactgagcactgccatttgtagactttaagtttacatcaaccatgtcttcttgttttgcagaagatagtgtttccattccaggtagtgctgcagcaatttttcgaaatagggcctttatattaaacccagccttagcactagttttaatgaacatgacattgagctcacgtgcttttgctttcccttcctctatagagacttgttttt

SEQ ID NO: 21607 - DNA, 357 bp, Glycine max
  Clone ID: jC-gmro02800027a07d1
aattcaaaaccaagatcatagtttttcctttcttaaatttagcattgactgctcaataatgtagcttttttattacccaatggtaaacattgatttcaattaaaacatgtcctacataagcctccttataaactaaataagaacatgggagtttagtccccaaaaaagtaaaaacatgcaagtttgaagccaaatttgtacataacaatacaaacgggggggttgactaaactaaattcactttttttttttttttgggggctgcaatgcttcctcctcctgggcttcctcatccttttcattctcctgggcctcagcaccttttttatcctctttttcacctccctcatttttttc

SEQ ID NO: 21608 - DNA, 515 bp, Glycine max
  Clone ID: jC-gmro02800027a08d1
gataattgaatcaagagattattattatatatgtgtatgcatcaatcatatgaataataattgaatatacaaaataatcaaataaatgaatcctcctcaacgacaccagaccaaccaggaagaaaaaagtactggagttcaaaacaatagaatgaataaagatgataatgtaagaaaaaatgttttatatgagtatagccgcagcgaaaatgagaagcagagcagatccggaaactctgttgaaaacggcaccgtttgcagctggtccttcagatggcggagtcgagatggtcgagggagagatgttgggagtagcagctgatggaagtggcgattccgaaggagaagaagtaggtggtgccggaggagaatttccggtggcgggtgaagccgctggtgacacagacgacggagacggcgacaacgcccttctaggtggagtggccaccgctgtgtgggtgggggacaaagccggcgaccaaactggagattgagccatgggggagcttaacaac

SEQ ID NO: 21609 - DNA, 346 bp, Glycine max
  Clone ID: jC-gmro02800027c06d1
gcatacaaatgctgacttttccttttaaaaaaataataaaacaaagatatttgcgggtcccatgttgctcaaaacgtttcgttttcagttttcacattttctgttggtacatgaacatgtcctgcatgggcgagagctggcccatttgatactggacagtgcctaaaaggtaatcattcacggaaaggttattatcgaccaaggtattaaactgaaaatcaaacgcgttttctagctttaggtccatatcatcgtttcacttggggtcgctctgcaccttcctcttgaacgtgacatcgggcgaaaccacgtgctccgaactgcttgagttcgggttcaaccttgg

SEQ ID NO: 21610 - DNA, 390 bp, Glycine max
  Clone ID: jC-gmro02800027c07d1
aagaaataaaagcatattgcgatctatataaaaataatcatggcatatacaaatcatcatatataaaattaaaccatgtctatcatgtatttgaactatcaaaccttagcgcattctaggtttcataatctatttataaacccacccttggatctaatgagtttggtgcttgaaaacaagaagacctatgagccaagtggttctgcatcgatctcatatatgaatataaatatatatacagcagcacaccatgttaggatctctccaatgccaaataaaaccaactggccatctatttaccgggggtgggtggagctacagcagagaatctaatcgaatgctgtggggaagaaattttcatcatctaaaagcatggcaatatcaatcaaa

SEQ ID NO: 21611 - DNA, 385 bp, Glycine max
  Clone ID: jC-gmro02800027c11d1
gacagtaagaggcattatcatattgaattgacggtgacaatgaactcaaaattgaagcagttaataaatgtgtacaaaacaatgaaatgtttgtatttgtaaatgaccttgttcctataatttacctaggcctagttctataccacctgaagaaactaaatatgatttccttttctttcttctgtgtatatcacttaccaccaatgggaaccccccccaaaaaaaaaagaagaaaaaatcaacctcaagaattgccatgtttataggtgttttcctatacacaactttcaccccctaacaagatgttaaacatcagcacactttattggtgcatatccaagtcttgatttctttaaatcatacaagatgtggaaattctgctgct

SEQ ID NO: 21612 - DNA, 569 bp, Glycine max
  Clone ID: jC-gmro02800027d02d1
aaattacatgattctcatggtactctcaaaacaagttaaaggtaacgaggtgatgcacacagaaatgcaccgcaacatctgataattaagcaccacctctattgatgtctaaaccactttgttactttcaacacccctctcattaaaaggcccccacaatccaattcaaatacaaataaccaaaacttcccacctgaatggcataataactaacattcaaggggaaccaactgatctatgcttgcaaaacaaactagtttaagtctcaatggcttttacttgaaaaagacgcacccaaaacgttaagattactttatctgaaaccacagaagcaaatgttctgtagtaaatacccacaccaagcacagatttcgctaattggttaagcccttgaatggtatccctgtgcatgcttttgccacattttcctcatcgtgaaccacgctgtagataaccatcacctcttagtctggtgtagtccgaaccatactgattaccctcccctttccatgcttctaccaccaaaacgccctctcggagcatctgcttgatagctgcctttgcctctt

SEQ ID NO: 21613 - DNA, 507 bp, Glycine max
  unsure at all n locations
  Clone ID: jC-gmro02800027d06d1
gagccaaatgatatttttattaaactaacaatacaatccaaaataataacagcaaaaattatagcatcaaaactgactttagaaaaaaaaacaagaatggacagacatccgattgttaaaaacataacttgatttaggatgtaagaataatactcattctcagagaaacagctcaacaaaacatttgacaattcctgcaggtctcagtttcttccatggtttcttacataggagttgcgtgctaacaatttctggctggaagtgaaccgatcacccttgcacatggatgctgctgattcagattcaagagtttgcacaggaagatgtccaagagactggaaagaatcaagggcatctaaagtcagctgccagccacaaagagctacactacccacaccagagctggagcagggattatcacaaccagcagcagcaacatccccattcacccaaggacagtagtcattatgtaatttgattggatcaaatcaaacacctncattactg

SEQ ID NO: 21614 - DNA, 486 bp, Glycine max
  Clone ID: jC-gmro02800027d07d1
caaatgctattaataatattccagtatccatgaataaagcagttttatcagcaagaatattttgtatgaaactgtgaaaacactgaaatcatattaaaattttacttaaagaacaatgaaggaaaatgggcaggaaaccttggacacaattctcaatagcagctcttgatcgttaggagaactatggagcaatttcaagtctaggctcaaagcaaaagccagtaaaaagctgcagcgggaatctttttgacacagggcacttctgcgaccatttccattgtttatgggtcacgtcaaatatgagaagcgccggagctccataactctgaatatatattagatcatttgcaccggtgcttgcaaacacattattttaactctctcaagccttggaagaatttgtggggcatttgagcaatctcttcccacttcttatcacttagaagccagataccaattccttttattatgtcagggcgatctggt

SEQ ID NO: 21615 - DNA, 453 bp, Glycine max
  unsure at all n locations
  Clone ID: jC-gmro02800027d08d1
ccttgtataaagttatttacatgcttacaaactacagcacctgaaacatgaacatgtttatgtaaaacggtctatgacgatcacaggactattactacaatcaaaatctgccaagtactgttgaaacactcacttggaagactgtatataagaacacgggtatgaaatgctggagaaaatatgctatatgctacttgaaactttcttcagtaggacaaaccgatagaatctcttttatctgtgcccccatttcctctttatcatgctccacttcagcagatttaacaacttcttggctagacctgtcaggggagcatgcattttcagggtcatcattttcattcgtgattttagctgtggctccattgtccaaattagtgtttgatggaactatntgaaccacgttcaccccagaaccaggggaaccattgcttcttgagaccacagcatgag

SEQ ID NO: 21616 - DNA, 501 bp, Glycine max
  Clone ID: jC-gmro02800027d11d1
gaagaaaagatggtagtatattaaaatttaaagaaaagaatacaatttgctgacgcaaagaaaaaaggaattggattgatagcggtggttgcaaaagcacgtgatgatgaatcattttgatccgaagccagccaaccttcccaagatcccctgtttgtatggcaaaaaggttctctttttcaaatcctctgtttccgctttctttctggcgtagtgcaattcatgcgcggagaggggttcctttctcctagtctttgggcctgggttggaagcttttgggtcttcgggcttcttgtagaaagtggggaactttctcaaggggttcttgctggaacctcttccttccgaggcgctgcggaacagcaaaaagtcagtgagcctccatctcctggaagtcttaaaaagcgagtcggctttgttgctctgcgattggttgcgttcctcgtcccacgtgtagtgagatattttgttaccaggagagagagaacgcgtgaccctact

SEQ ID NO: 21617 - DNA, 482 bp, Glycine max
  Clone ID: jC-gmro02800027f05d1
cgagagatgaaaagggagaaattaaattgccggagagatgcactttatgaaagatctttccgagaatgtgtgctacaacctactatgaaatttaatttgaggtatcctatatatattagccaaaaaagacttgctatacctttaccatcatgatgaggcatagggtggtgcacagcttgattatctgttgtttaatcagctcaacatgtcatccttagtggaactttatttccactttaaaggatcaaatatgtcccagccttccatgttgtatttacatagagagaccccttgctctaaagaatgatctctattttatggaatactcaaacaattgacactaaattagcaacacttcaccataattccatttaatttttgtgcaacaatcttcctgagatggcagcaccaagtgctgctttaaaattaggatccgtggccaaagaagttgccatctgttccaccaaaacctgagggacttt

SEQ ID NO: 21618 - DNA, 492 bp, Glycine max
  Clone ID: jC-gmro02800027f06d1
aatatcaacttcatcctcaacatggatatgtacatctccatcaatcaggttatggatccaatccggatacaaaacatggaaattttgggcagaagacatgtctacattctttctttctccaaccatttctaacaataacattccataactgtaaatatcagacttataagacacattcccaaagtttctggagaaaacttcaggtgcaatgtatcccacggttcctcttgcagctgtcatggacaccaaactaggattcttggaacacaatttggctaagccaaaatcagaaatttttggagtgaagttgtcatcaagtagcacattgtgaggattgatgtcaaaatgaataatgggttgattacaaccttgatgaagaaactcaatccctttagctataccaagagcaatctgttgcagcttctcccaagcaaggaaatggttcttgtcgtccggaggaactataattcgttgaaagaatccctttggaaa

SEQ ID NO: 21619 - DNA, 277 bp, Glycine max
  Clone ID: jC-gmro02800027f08d1
atgaaagctactatttgtaagatacagaataaatctttaaatacaattcctgaatgagcgacaccccaatttacacatacacaggcgaggttgatattctgaatctgattttcaagatacatatattagtaatgagtttgacaaaacaagtcacaaaaacacaaacaataagtagctgagcatcaaagtgttcttaaagcattcagcatatccacgatcatccaaaaactttattaaacaatccaagccaaccattatgtgggtgaaactagggatt

SEQ ID NO: 21620 - DNA, 458 bp, Glycine max
  Clone ID: jC-gmro02800027f09d1
actcagaaattacaatctaattaaattcacaaaatataacacatgaaggagatgtatatcagtatacaatgatataactaatcgatttaaacaacttcaaactaaacataatttatagtatggcacaaaatactagcacaccgacacaatcactctcaagtagctacaacatattatacactagtgaaaaaatgcataaatagtatcacatccatcaaacaagatgaacaaggcactggaatgcagccagttacgacctgagaacaggacaacataaggcataattcaaactcaaggattgctggttgaaaatgctttaggaaattgaggaaccttgggaaactcaagtattttaggtatttcgggcttaggcaatacatgaaccttaggtaattcggggactttagaaaactcgggcttaggcaattcacgaaccttaggcaactcaggtactttag

SEQ ID NO: 21621 - DNA, 428 bp, Glycine max
  Clone ID: jC-gmro02800027f11d1
gcaaataattatccatagcgagccaattaccggcacaagagtctaaaaccacccaaaatataacaacaggaagaaaccaatacaaggttcaccgagttccgctatgcttccaaaggttcatggatcacattattgagccaaaaaaagaaaataaacacttggcttaggttcggacttaggaagtgtcccagggcctaggttcggggagggcaacgaccataccttcgaggtcgtggtcgaggagaacttggcatccgagcctggagtgtttgttgaggacccttgctcgggaattgcgaacgaggacgtactcctcgtcgtaggagcgagggggtagcttgtcgagccactcctgcgcgatgttgacctcgcagtgggccgcgcaggcgtcgatctccttcaggcggtgggactccgggtcgaccagg

SEQ ID NO: 21622 - DNA, 559 bp, Glycine max
  Clone ID: jC-gmro02800027g02d1
aatattaaactacacttttttacattgcattgcaattctaaacaaacccctcaatttccgaacgtgggtggacctaacattttccatttttaatgaacaaacacaaagcaaagcctccaaaatatgacttattcaacccttcccaatgtcgtcataactaatagattttttttttcttacacacgctcgaaataggttcgtatcaacggcccacgacggacggtcctgatcaactcaccctaatcgcttcgatcatcatatcaacggtgcagattaaatcctccgtagcttctcgcctttgatcacgggattcgcccgtgctatctactttctccccaccgccttgaaatcgaagccacacgcgtgtttctcggggtaccggtgagtcccacaaaacgtggttccgcacctgcacttaaacccagttaatcccacgcgctttctacacgcgccgcaccggtttctctgaaccggtgcggccacatttggcgaactcaccaccgacggttgagggagggattcaacccgccgccggaagaaaatccaccgcgggaggcaa

SEQ ID NO: 21623 - DNA, 448 bp, Glycine max
  Clone ID: jC-gmro02800027g06d1
gagtagagccaagtcggtactgaaaattaaattactttgatacaacagaaccaatggctcttttaaacaatacaaattatctcaagtccttataaaggaatgtttataaacaaaagcaagccatatactcactgctttgtgagtatttatatatatctctctctcttccctactcaatgtacaaaatgcttagtgctttgttaacctctcaaggacttcaaagtagtcaggaaatgtcttcctggtgcaaccaggatccttgatggttactggaacatccccacatgcagcatgagagaatgccatggccattctgtggtcatcatatgtgtctatagctgcgacattcaatttctcaggtggagtaatcacacagtaatcaggaccttttttaactgttgctcctagctttctgagttctgtgcagattgctatcatcctctcagtc

SEQ ID NO: 21624 - DNA, 474 bp, Glycine max
  Clone ID: jC-gmro02800027g07d1
gaaaaagaaaatagatcatattcatcattatcagatactttgaatggaataaacccaatttaattatctttattattggagcctatttattaatctttttcatcaaataaatctaaagctaatgatgttcaaagccaagcagggttcttcaaggatgtaacaacagccttcacttgcaagtagttcttgagactgtattctcctttttctcttccttggccactcattttgtaccctccaaagggaattgctgcatcaaatgtatcaaagcagttaatccacactgttccaactcgcaatgctctattcaaagtgttagctgtgttaatgttttttgtgaacacccctgctgcaaggccatagtgtgtgttatttgctctttgaatcacatcatcaaggtccttgaattttaatatggtttgcactggaccaaagatctctttctttgcaatcagcatggcttcctaacatttg

SEQ ID NO: 21625 - DNA, 386 bp, Glycine max
  Clone ID: jC-gmro02800027g08d1
caaaacaaattcaaactgcatccagttgttattattaacatgctgctactccatcgggttaatgcccataaaactgaaattacaggaaagcaaacaagaaggctctgtggccataacatatttacaagcactcaagcttattacataattcaaattagcttgagtgcccttgagaatttttcatcatcattatctaataaccaccttgtatgaaagcattcaagcgctcgacctcttgtcggtgctcacgcaccacagcacgaaccacatctccaatggacaccatgccaatcatccctttttcatcaatcacggggatgtgcctgattctattgtcagtcatcagttggatagcctgcaaaactttggtatcaggggtgactgtg

SEQ ID NO: 21626 - DNA, 512 bp, Glycine max
  Clone ID: jC-gmro02800027g10d1
gggacaaaattttgataaaattttcattgcatcaacacagtaacattgcatagccaaacaataaattgtgagtatagggagaaaaaaaaaaaacgaacagtttaggtattgatgagatggcattagacattgaatggagtagtagtagaagtagtcatgaaacacgcatattattcatccacacccagcaagacatccactgaagggagtgattaacttaacaacactcttaagcttgaggcttctctgacttgagtggcttaacaacttcccaggggaagactgcatcattccttccaaagtgcccataagcatctgtcttgaggaacctatgaccacccctcttaaggtccaagttaatggtgatcattccaggtgtgaagtcgaaattctcctttacaatttgcagaaattccttgtcaggaatctttccagttccataagtggtcacaaacaactgacaagggctcaaggacaccaatggcataggaaacttgcacaatgcacctttt

SEQ ID NO: 21627 - DNA, 413 bp, Glycine max
  Clone ID: jC-gmro02800027g11d1
caaaatgaataatacaattaaataaataaataaacaaactatgtcagaataaccaagaagcattgccatggcagcaacccttgctgctcatgctaccatttgcttatgctctatatacagctgctccacccatggtgaaagcaacatctttttactggaaaagaacatattgctgcttctacccatggtgaaagaagcatctcttggctgaaaggataatataggtgcttataaaacctttcggagggaccatttttaccccatgactgacccccccataattccggtggggggccaaaaacggttttgcctatggggatgaagaatgatgtccccttaccccaactgttttggaacccaaaggaagcagaattcctaagctggtaaatttaatttcatttaccccccaaatc

SEQ ID NO: 21628 - DNA, 483 bp, Glycine max
  Clone ID: jC-gmro02800028a07d1
gagaaaaagaaagatgctatatatttattctttgaaatagcaaatgtcaagaacaacctaggatttcaaagggagaaatcctaaattacaacttataagcatcattttgaaacaaaatcctaattaacagcgatatagctcaatgacaaacaaaacaagttgtccacaccacacacaattttccccagagattctgagtctcacatacatgaatctattttgaagcagggaggctttcatagaagcctttaacaaacacataattcttagaaatactaagtctcacaccacatcatcaaatctattttgaaccaaaaaggctttcatagagacccttgaaaaaggagaaaacaggatctctagggggcagactttctttgacaattggatggttcaaaaattcttggctccaattgtggagcttaggaaatttctcacttgtgaataactccaaccctgcaatttcttgaaccataaggaccc

SEQ ID NO: 21629 - DNA, 491 bp, Glycine max
  Clone ID: jC-gmro02800028b02d1
atcctattaacaaaattaacaatctaacaactaatatttgtcgataaaaaaaattacagtgggaggcgatcacaattttggtaaaacaaatacaacagaaggcatgaatctagcaaaccaaaagcatcgggcataagcttggtagcaccaaaccaacatacaccttgacagcaaaattttatttacaatttagaatcacaattcacaagcttgaatatataatggatccaatctattaatatactatgtaggataaaatttagtgtgaaaatcacaatagctgtcacaagtattttttgatttatgaacaagtgaactgaaagtttctgtttaaaaaacgaggaacgaacgcttaaaaggttgggaatcatgatttaagacctcgtcatcaacggttgggtgaactagtccttaacaatggccttcactgtggctctagtttatccacaccatctagcatgataccatctgaagcaaatttgtctaaactg

SEQ ID NO: 21630 - DNA, 481 bp, Glycine max
  Clone ID: jC-gmro02800028b03d1
aatattacaccctttctaccctttctaatgaatataaaattatacagggataaaacatgtggctaaagtgcagagatgaaatatttgaaattaagcacgtgtagtctgtagaacacgcatgtgctaagaggcagctaaagtaaaatgttttttttttatccctacataatattgataatgcagccttttttcatgcaaatatcttccattggtccgtcagttaaaaatccttgacgtgcatcattcatcggctaccgcctcaagctctccactatgtaatccgcatacaagctcatggatcgcttaaccgcttcaaaagcagctgaggcaggcaaaaagtcgtttactgcaacttccttgttttcattcttcttgtagtcttcaaaaaaacgacgaatttcagctaaacgatgtggaggaagcctcttgatatcatggtaatgtctatactcaggaacatcagcacagacagcaataattt

SEQ ID NO: 21631 - DNA, 452 bp, Glycine max
  Clone ID: jC-gmro02800028b06d1
gaacttgaacaatgtgttaagactaaggtggtaaggcaaaattccaaggggatagtatgattacagtaagactaatgttctcctttaactacttatgaaatcaaaactcatgctgaagaagtcttttacggtctatcttaaagctaaaacaaacaaaggggaatcggcagcaccgtcattaaatagtggatgtcatgcaaaatctacaactcgtccttgacatcattatcatcgttaacagcatcagtttcaggctatgaattttctttcgggtcactttcagcctctacttaagggtcatcttcctcctcaactgttgcttcaggactgatgtccaggctagtcttcactgaatcataaatccgggaagcaaaattcttgggatcatcaagcaggaagccgttttaaagagtgcagtctggtacatcatctgtgctgtatgcttcacaccc

SEQ ID NO: 21632 - DNA, 483 bp, Glycine max
  Clone ID: jC-gmro02800028b07d1
aaccaaaccaataattatacatgtaacaaaaaccaatcgtaagtaccatatcctcagtgtctatacactcaagaacaaaaaaacagaatccactccgctccaatagcgagtggccacttcaatcacattgatacaagcaagaatgattatcacctcaacaatttccttggttccatatctacatcatgatgtggagcagcatatcaccaaaacaaagcactctaatgaagcaaaaggaatccagggtgccaaaatttggcactcaagacttgcagcatttgtatgcttgtatatttacacaaagaagtcccatacgtctgtccatgtcttgctactaccctttcatttcaaaggcactcaagaatagttgcaaattatctgaccacgtctaatctgtcaatcacattcaatgctctctttttgtcaataccaaaatcaataacaggaagcttagacaaaattctaataaaagaaaattccttg

SEQ ID NO: 21633 - DNA, 456 bp, Glycine max
  Clone ID: jC-gmro02800028b09d1
gtataacatgttgtttttattccacttatgaaaaatttgaccgttgaagttaaggtgaatatgactacataaagtcttcgacatttaaataaaaaatcttaatgatacaagagccaacattcggctttatttaataaatcttagaagcaaaacatatagttccttttattttggggtatgaggggagaacattgtttaatcctttcacaatatcctcatctaattaatgccatgagaaagaactctgcgtaccctagcttccagatgaacatatagaatgatccagtggaagctttgtggctcaaatctacggacttggcttggtaccacagaattgaagcaagaacaggattctccatacccgtgaaaattttaatccaaaagtgggagcatgatgctccggccaggataccaacttctaaagccatttaaaaaagtgaacgcacattcaaatgc

SEQ ID NO: 21634 - DNA, 486 bp, Glycine max
  Clone ID: jC-gmro02800028b10d1
ggtggaattgccttttcttcataagcaattattttattatttgtaataaaaaaggacaattcagtcagcaaacccaaactaatcacaaaaaagaagaaaatacatacagggcaacctaaaacgtgctttacagaaaaataacagcattttaaacttggatacaagcaagtatattgttcaaacttcaaagacactcctaacactagaaatttgaaacctttaaagaaaaaatgtaaacagaggtttaaccatgtcgctttccagacatgctgattgagctgactttcataggagttgccaccaccaacggagcttctggagagtcactaacagcaaatttgtcgtgcataaatcgcgattctacaatggactcatccttcaatattatcttgtaacagtaacagctcttcagcccttcttgattcctgtaacattcatgagcactgttcttcacctgctgaaaatcccatatcacactaaacttgc

SEQ ID NO: 21635 - DNA, 454 bp, Glycine max
  Clone ID: jC-gmro02800028b11d1
caagaacaaaacgcatggaaatatattcaatcaaaaatcaaacaaacaagatgtaagcaacacagcacgcacgcacaagagggtgcaagagttccaattatagctaaaagtattagctaatttaagcaatcatacaaacccaagttacacaaaagagaatacttctagcaagcattctgctattacaacattcgctagaaaagataagcatctttctccaagaaccgccagactcgcatgaaatcaccagacaagaccaaaatttttcaaatgtctcatgctttgctggcaatgttgttagaaagccagtccaaaccctcatagagaccctctccagaagttgcacaagtgctctggatataccagtggcgttgacggagtgaatgaagtccaagcttgtcagttatttctgcagcattcattgcattaagaagatcttgcttgttggcaaaaa

SEQ ID NO: 21636 - DNA, 480 bp, Glycine max
  Clone ID: jC-gmro02800028c02d1
aagtacaagaacaattttttacattgaaacttttcataacaaggctttctacatgttgttggtttggttcactcatcaatgtgatccgtaattctgagaataaatgtaatttccaaaaccaactccaattttaattccatttgctactcccaacattgttcatcaccagaaaataaaagaacaatttatactagcaataaagtgttacatacaacacaacaaacaacaaagacagagaaagacaatctgcaaacaactcacgaccaaaactatagatgaaaaatggaccgaacaaatgatgacatgcatatttcttactcttcaagttcaattttcttcatgtacccaaaaccaccaccagaggttattttctctcaatcagagtagggtttgatcttgaacctgtaaagaagcctcttctttttaaggtaggattgtctatggtgagcaacaaattttccagttcaccaactttaaagc

SEQ ID NO: 21637 - DNA, 430 bp, Glycine max
  Clone ID: jC-gmro02800028e06d1
aaggaaagaaaatattgggattccgaaaggttcgggaagattgacaatatatatcataaacaaaagcaaaatttaaaaataagctaaaataaatgtatattaatatattaaagaaaaagaatccaaatatgtataagacatatggagtaaaccttgccaagggtttcgggtttggttgtgttgggaggagtttatgcagtttcccacgccagcaatgttgaggatatcagtgtgagagagatgtttaacacccaagaaatctcttgtcaagccttcgttattgttttctccggaaccgtcaccgtcaccttcatcggcggtcatggcatcgccaccaccaaaagtgtcctcaaaagtcccttcaaagggggaagaagagaaagaattgattacatgatgaaggagtgaaggtaaaacaccacacccgttt

SEQ ID NO: 21638 - DNA, 368 bp, Glycine max
  Clone ID: jC-gmro02800028e07d1
cccacaacaaataaagaaaggggtgaattcatagagaacactggtccgcaactttcacaagctgaacaaacatcacactaaaagaaaattttacgagacccccccccatttttttacaaaatggcattttataacatcaccacttaacaccttgggttcctatgacgtattttgaacaattaataaaatatctaaaagtatctttacaagactacatctaacacgtaaaaacaagtggaaattcagataattccataaaacaggggctgttctcgaacattgaaacaatgcattttcaacccgaacatcatttttcttttcagacctcaagcttggtggattgatagctctgaaaatcaattccatat

SEQ ID NO: 21639 - DNA, 522 bp, Glycine max
  Clone ID: jC-gmro02800028e08d1
gacacacacaacaaaatttatcaataccaaattacaaaattaacatagcaaactaaggctcaactctttccagataagtaggaattgtacccttcgaatttaaaagcttttgacttcttaacatgaacgcaattcaataaaattacattattcaatcaatggataaactcataaaagttggtactggtcacatcttccacacagtaaaagcaaccatttgcatatatctttaggaatcccctgttcttccaattctcaaataaatcggaaacttggcaacttttttagcattttcaccccaagcaagcttgaatttttcaacaacatcctccgagagaagctccactcctttctccttagccgtctgatatgctgaccatgatcttatgtaggtcaagaaatcatccaaatccatcattgtttccgccacaaactcaaagggtcctgtgtgatcagctccatccacgggctcaaatggaaaatcaatgcctctattaatggcatcaacccatttacgagctg

SEQ ID NO: 21640 - DNA, 501 bp, Glycine max
  Clone ID: jC-gmro02800028f02d1
acacatacacaggcgaggttgatattctgaatctgattttcaagatacatatattagtaatgagtttgacaaaacaagtcacaaaaacacaaacaataagtagctgagcatcaaagtgttcttaaagcattcagcaaattcacgatcattcaaaaactttattaaacaatccaagccaaccatcatgtggtgaaactaggattagcactgtgcatttggcgacgaagttctccaaggaagtcctgttgagggggtctgaacggagtccatcctgatgtcccactcgaatacataactggcttttcagatgaatctttgggattattgtaggattgtagtgcagctgtccaacgatcattaagcagctgggcagctgcactacaactacacccttctaaagctattaatcttgaatagtgaatctcattaagaagataactggtaccagcatctccgtgatctggaatgtgaacacatcttgaatagcaacttgattttttt

SEQ ID NO: 21641 - DNA, 447 bp, Glycine max
  Clone ID: jC-gmro02800028f03d1
gcttgtgttcaaatgaaacaaattctcaatttcgtgaaagaatatacttgcatttagataaaaatacattgaggaggtctttttcaccctttcaaaatgcaatcaattgggacaaaattctgataaaattcccattgcatcaacacagtaacattgcatatccaaacaataaattgtgagttttgggagaaaaaaaaaaacgaacagtttaggtattgatgagatggcattacacattgaatggagtactattagtactcgtcatgaaacacccaaattattcatccacaccccgcatgacatccactgaagggagtgattaacttaacaacacttttaagcttgaggcttccttgacttgagtggctctacaacttcccaggtgaaatttgcatcatcccttccaagtgtcctaatcagctttcttgaggaacctatgaccacccc

SEQ ID NO: 21642 - DNA, 487 bp, Glycine max
  Clone ID: jC-gmro02800028f06d1
caaaaaaaaaaattctttatttgcctcattcttgaaaatgccaaaaacatatgctttactttacattacacattcaaaattgctatggtgaaaatggttacatgcataccatctatatttcctatttgtggtatgaataaaatatttatgtattggcaatatcttcccatcaaacaaaatggctacccatttagacaaacaaataattttgtaaaaagtatattgtcaacttcaaattgcattctataccttcagtttccaccctcgggcagcaagtgcttcatgaacctttttagcagcatcagcagtatcggtaaggggtggataactccaactttctgatatatcctcagaacctgtaaaaggccgaacaactccctgctctctcaatgattagtggaattcagtgaacttccatctgcaatgcttagctcccagaacataaacaggcttcccaatgctgcatgcttcacttacatgctaactg

SEQ ID NO: 21643 - DNA, 463 bp, Glycine max
  Clone ID: jC-gmro02800028f07d1
aagagtaaaccattataccatatatattaaagaccataattaacatcaaaatacctcatccaaatattcagattattctgcacaactcacaaaacatactaggaagggcgttcacaatacctcatccaaatattcagattattctgcacaacttataaaacatactaggaagggcgttcacaatacttcatccaaatattcagattattcatcaccaaaacccttgacaagcagcttttaggcttttttgcagacttctccatcacaaacccattcatctttggacttttcttccttggcatcatctttgcttccttctatgtcctccttttccaatgcacattttggatggagatcaaagtcacaatctccacagtagtaggaccatatatgtccctcttcattgcaagcattacagtaatacaccctgcggcgcgtcaacacaagctcatgctcatgtaat

SEQ ID NO: 21644 - DNA, 370 bp, Glycine max
  Clone ID: jC-gmro02800028h02d1
attcgcaaaaaatgtaaatgctattagtaatcataggaaacctaaaaaagatgaggcaagtttgttctccccgagacaattaaagagaagcccccaaaccgagcctagcatagcttaggattacacaagaaatcggaaaaattggggcccaacttcttagctatatcctatttgctgcggatgctgggggggttggtaatttgcatagccaggaaaactgccatacatattgggaccccgcccagcaggggcataaccggaatttttatggcccccctgcgcatatccatagtatccacccacacccctaccattcccctgggtggaatctggttgaccctgtttgtttgaaggactttggccccatgaa

SEQ ID NO: 21645 - DNA, 527 bp, Glycine max
  Clone ID: jC-gmro02800028h03d1
cattcaacggaaacaaaatgactgagttcttaaaactattattataggaatcgcaatacaatccagaaaagaactagcagttacttagacaatcaagttgtaataccaaagataaagattaaaaaccccttccgtcgacatagcagaaaactttaaaatggacatgcttgtcctttttactagtttaagccttggtttcaagaagcttatcgatcatatcagcagcgtcttgaacggtggtgatactctgggcactttcttcttccacggtaataccaaattcctcctcaagtcccatcacaatctcaaccgtgtcaagagaatcagctccaagcgcagcaaatttagactctccagtaacagctgattcatctggcagtgccaattgcttcttgactatgtcacacaccttcttcactgtctctggttttgccgcacatctaagctgaaaccgacgccctctgggctgcaatgttacggatgggaaacttctttccttaattgaaggggaaactggaccttgggtt

SEQ ID NO: 21646 - DNA, 466 bp, Glycine max
  Clone ID: jC-gmro02800028h06d1
gaatataaatgagcaaacactcaatttctagccactgcttcaatcaagatcttataggatccagtcataagtcagtggtaaggtatgtaccagtagtatacaacaatgctactttcagtactatgatgcatatatccagctctaccctgaacgcatgagtgacaaaatataaaaaagaaaaagcgataatcgtttagcgaaattcttcaccaactcagtcagtgacagttcaatagaacattcctgaaaaggcaacttcagtacaaaatcacatcaatattgagatgccctgtgacagtatgtgaaccttcttaaaccttcaaagcagctttatggaccatggtttccttgtgtatttgatgacaactcttctccacaagatcaagcaatttctccaagtttgctgcccatgaattaagaatttcattgctatcctctgctgtgtggaaacagactatccccattg

SEQ ID NO: 21647 - DNA, 473 bp, Glycine max
  Clone ID: jC-gmro02800028h07d1
agaataagcaaacttttgataaatatgccaaccattataacatagcattaaaattttaaaaccactgtaatgtatacaggtaccccactaaaaaagtacaaagatagagattatagtcatcatttctcaagcatcaaacactttcttcactacacgcagatcccgtgacttttcatactcacaacaagattattacactgcaatcaaagcattccagtccaggtcgatgcaaaaacttgtacagaagccaatgaaatatgcacgataacaagacataaagcaaagattagagaccctgatcaatgagataatcgccaagcctttcaactaccatgttgcattgacctggagtcattggttcatcataaatgccaatgatcaaggccgcaccggtcttctttacagtaacaccaccaggacccttctttcctcgaatgacagaaccaggctcaccctggatgaccatgtatttg

SEQ ID NO: 21648 - DNA, 449 bp, Glycine max
  Clone ID: jC-gmro02800028h12d1
ggaaaacagaaataactgcaactactattcaacaattaaagtctggaacatataaccactcaaagcattacaagatatcaaaaaattgattcaatctttaacttaaccttgatgtatttgaacagaggcttctactaactttgtaaggtaacactacccttcaatgagaactgaaaattcaaatctcacattccagtaaaagccttctttgcaccgttagaggatccagcggggatcactttcaacacattgaacctcactgtctttgagattggcctgcattggccaataataacatgatctccttccttaacacggaaacaaggtgatatgtgtgaaggaatatttgaatgccgcttttcatatctctggtatttcttaataaaatgaagataattcctcctcacaataatggtccttgtcatcttagcactgtgacaagtaccggc

SEQ ID NO: 21649 - DNA, 451 bp, Glycine max
  Clone ID: jC-gmro02800029a06d1
acgagaaaggaatttcctgaattcagaaaatcaatacatggaaaaggttcataaattatactataaagaaacaaaattaaagctaaaaaaaaaaaaagtttgatctacgagagacaataacaataatcctccacatacatgcagcagcaacagaaagtgtcactactgtctatgcatccctgaattatggtctccaaatccatccctatacatacacattttctctgcatcctactctttaggaggcatttttatttcacaactgtgaatatccataacaattcaaatcaatatggagagactttctcctctaacctcaatccactggaacaacctcttgtcagtgttcatcccatattacaaaaaacgtgtgcaggcttacacaagcccttctggatttgtcaggttctattaattttgcgacgagtgacgcgtacttgacctggctggc

SEQ ID NO: 21650 - DNA, 455 bp, Glycine max
  Clone ID: jC-gmro02800029b01d1
gtaaaaaattataatccacaaaggttttatttattaggtctaatgtatggcgtgactgaaataataattaaagcgatcaattatccaataactagacagtgcgaaatgatcctccatactcccaaattagttattgttgtcgtaccaagattgcttttgaagataatcgattatagtcttgtccacctggaaagctttggtgagaacctcagaagaaataggcggattagctttaaacaaagcatttgcaatagtgatagctcctggattttgactgctaaggccagcaatggcaacagcattgccatatcccacattcaattggaaatgaatcagaccaattgggaacacaaacacatcacccttgttcagcactttggtgaagaggcgatttccatcttgattggaagtcacaaattcaacataaagagtaccctcaaggactataaggatct

SEQ ID NO: 21651 - DNA, 354 bp, Glycine max
  Clone ID: jC-gmro02800029b05d1
gaacactacaaattgaaaggtgacatttaataaaccaaagcaacacaacgcagcaaagtcctgaaactcgctgggcttaacaaaaatgtaatctggggttccgacaaacacatcacattataacacagattactaaaagctattttgccaccgtcgatcaagagcccagttctgggaacaacaattgcgagatgatggtggagacttcaaactttgtccgaaaaacaagctacctagaaaagatgacacacgagtacagaaaagaatccaacattgattgtgaccaacatcccctgaggaaccagcccgcacagattcacttcttcttctgggcagccttggagaccttggctc

SEQ ID NO: 21652 - DNA, 497 bp, Glycine max
  Clone ID: jC-gmro02800029c02d1
ctgataaaatttccattgcatcaaaacggtaacattgcataaccaaaaaataaattgtgagtcaaaggagaaaaggaaaaaaaaaaacagtttaagtattgatgagatgacattatacctatgaatgaagtggtagtagtcatggaacacgcaaattattcatccacacctagcaagacatccattgaagggagtgattaacttcacaacaatcttaagcttgaggcttctcagacttgagtggctctacaacttcccaggtgaagtcagggtcatcccttccaaagtgtccataagcagctgtcttgaggaacctatggccacccctcttaaggtccaagttaatggggatcattccaagtctgaaggctagattctccttcacaatttgaagaatctgcttgtcaggaatcttcccagttccataagtgtccacaaacactgacaagggctcagggacaccaatggcatatgaaacttggacaatgcaccttctg

SEQ ID NO: 21653 - DNA, 399 bp, Glycine max
  Clone ID: jC-gmro02800029c06d1
aacatataaactagacactttattccagcaatagtacgagtgtaatatcataagcagagattaataattctgatcaactggccctactttttacagaagcgaccaagcaccaaacatttatatatatatctgtagataaaaagcagtgcaccgtgaccgtgacacacccagtcactagtgcaaaacactcgaacttgctcatgggcaagaaatgaccactgtattctaagggaggatgtttagacacaaagcaccgagagagcatcatgatacatactacatgaatttcgtagtttcgaaaagagagagagaccttattagtatccctaagggccattgatgcctgaagctgtacgtctacaactgctcacttgcattagccggggttgcaggggctgt

SEQ ID NO: 21654 - DNA, 428 bp, Glycine max
  Clone ID: jC-gmro02800029d02d1
ctaaaaatccctttgtattaatgtggggtgataaatcaacagtacaccgaatatatgtccaaatgtgaacgactaaaaaaataaagcaataaactaattctggttctaaacttattaataatatactgaatcaagggtcgataaacaataataaaattaattcaaggaattaaatgaaaacaacaactatattgatcaactaaatctaccatatgaaaatatcattgtttacttgaaaagagccaaagatatcttcaccttaataattgcttactgagaagaatattcacaatcttcctaaacccacggaaatgctacgaaaacgcttgggccaacacaatgatagtgtcaaaccaatagctatgcggggtgttccattcgatattccattcctcggctgcagatgaacattgctaatgacctatttg

SEQ ID NO: 21655 - DNA, 558 bp, Glycine max
  Clone ID: jC-gmro02800029d04d1
gttaaaagttaaaacatgcatgatcgcatttattattttgggttccattatactaacacaactctgtttattaatgacaaatacaaatacattcagccactccaaatacatgacttaagcatacacaactgattaaggaatctggttccttcaatttcacatttatttaaaaccaggaacagtacttatgcaaccatagggtccttagatagagatactgttgggaattcctctgaaagtcaatccctcctcactagaaggatagagcagagtgtaaggcattttagctggcccatagcggcttctcaatgtctcatctttgctcttctctataagcttcttttcaatctcttcaagcttttttccaaacctcttaaatgcctctaatggaccggcatcagaagtccagtaatcaccaccatctctctgtccaaggtagaactcatcagatgcgtgccttgacacgatttctataacttgaaggtcaaagaagggctccttcttgccagaaatagtcttcaaaaactccctctcagggttcttaaccaacgcatcata

SEQ ID NO: 21656 - DNA, 284 bp, Glycine max
  Clone ID: jC-gmro02800029d06d1
agaagcttgaaaatggagcatatgtaacattcgtgttgggattaggagggacttgacaaacaactagacatatacctggatccctgcctactattattgccagtccaggacttagcttggctagtatacaaatagctgtcattagcactttggccgtgcattcacctagctaggctctttttcacatttgatcggaatggacagtttgaggccaagaacccatccaccaagtgcaagtaagcgccctagtcatgacaacaggccatgccagcatggggcttaaa

SEQ ID NO: 21657 - DNA, 497 bp, Glycine max
  Clone ID: jC-gmro02800029e01d1
aactaacagatcaccaagaaaagcacaagcttcacaagccatgaaagaaatagtagcatttactagtctaggacttggaagtcaacatattttatccgaatgaaccaattgacttgggtatgggtaccaagcaaaaaacaaagtaggctctggcaatcacacaaaacaggttttatggccttttcacgacttgtccgcctcatatacattcatacatacatgatattcgtccaactcttatattggaaaaatattgatttcaattaaaccattgcaggctgcaatatcatatatatattcatatacacaaacaatatcttcctgtgacagcaactgtggtgatgcgtcatgacgtgaactgtaccttttatatgcgatgatgttatttcttatccgttgtaacgccaacaacaacattgctcaccaatttcccacttgaatcaacagacattggattttctaccactaccggttgactttgagatttgggcattgat

SEQ ID NO: 21658 - DNA, 342 bp, Glycine max
  Clone ID: jC-gmro02800029e03d1
agaaacccaaaactctataattctaacctctgtcaacataaacatgaaaataagcacgcgttcactattaatcaccgttatgccagggaaaacccccccgttacaaaaaaaacagccctaaaaaaccgggccggggtcaataaactgcccccccccaagaaccaaaacaaggaccgacgggtaccaaaccccccctttttaactggaagcccctccaggccctgcacatacatgctatgttcatccccctcctaatgcactgtaacaccctaaaaggctctcaagcccttgaaattgtccacatcgccttcttcgaattccttcgccccaccctaccggaaa

SEQ ID NO: 21659 - DNA, 461 bp, Glycine max
  unsure at all n locations
  Clone ID: jC-gmro02800029e05d1
ggcaaacacaatatcatataaactattaacagcggcagaacctcgtggcttgtttgctatagccaagtctagtgatgatatataggatctatataacatattatctttaaacacctattctttttttttcttcttttgatcagatcatatcacttatgagtggtgttctacctaacattttccatccatgccacgttccttctgcttggagaataagtgccatctctactttaaccatctataattcataacctgggaacctacagttgccgggtgcaagccgatcaaaccagaggcttgctgtcccagcaagtccttggaaaagtgaatagcccttgcccgcaacccgagattttgccttatcatacaagaaggtagcgaatgattttggtctctcttcgcatataccctctttatngagtctgaacaaggaaaggaaagcataagcatttccagattcc

SEQ ID NO: 21660 - DNA, 344 bp, Glycine max
  unsure at all n locations
  Clone ID: jC-gmro02800029f01d1
gccataaataaaatatccttgattgaaatataacaaagaagttgaggattactggaagcattaacttgatttgcttatcttgacataggttgaatagaagcaagcataatatcaaattaaaggcatagtagaatgagtagcaaatccattctcatccagcatggacagagaatgaaatcctgctactttagtattcctaattacaatccaaaccatataggcttaattaaacatataattaatagagtatcaaggtccatctcgatgtaaaagttggcatacagaaagcagggagaagagagatagagagtgatgagatctacctatgtgctaaccatggnttg

SEQ ID NO: 21661 - DNA, 447 bp, Glycine max
  Clone ID: jC-gmro02800029f03d1
ggacaaatgaaacggacacggattcagtaactttgagaaacgaaaacggtgacttccctcattttttgttaagcggtccgtaacttaaataatgattaatgaaaaaaataaggaaaagtatgattccatgtggtcatccaagagctggccacattcaacataattacatgtcctctttaggactgagttttcttagttcttcctaaaaaaagtaaaaacaaataactaggagctagaaatatagcattttaaccgagtgatttcagagatggtcatcccatggttaagctaaactacgagagaatcataagatttactaagccatcatacaattacttataaattaacttttggcacctagtcctcgcgactttggaagcctaacagcactcaacggagtggtaatgccttgtgattgtcttcctaatcccgtgccttccacaaagc

SEQ ID NO: 21662 - DNA, 491 bp, Glycine max
  Clone ID: jC-gmro02800029f05d1
ggattacgcttgtctctgaacaaatattcaaacttataagatacatgaaccatgttggggcttatccaaattaaaaaacatgaaccctgtatgtatcaaaaggaaataaaaaatacttgtgtttaacagtttatttgaaactcgtagttgcgaagctcaacctaaattccgcaggcggcgtttattatgaatgagagaatgagataatgctaattattgaaacgttttccttctacgcagcggaggttaagttgaagttatcacacgttgttcggcttccatagagcaaagagctgaatcccaatcttgaagtagccaaatcgaactgcaaaagattatcctccagctgatgtcctccaatcactatcgaagccctcggattcttacctccattcacaaacccaaggcataacaccttatcatggctcacactaaccatcgagttcggtccaaaaatcctacaaaccgtattttggttctgcagcacaagc

SEQ ID NO: 21663 - DNA, 495 bp, Glycine max
  Clone ID: jC-gmro02800029g01d1
gaagtaaatattaaatattttttcattttcaatataataaatatttctcattaaatacattcaatcaaatcaccatcatacagctaaaatgccaaacttatgctatattttctcctttatcttccccctaataatatgctcaaacttattgagcttaataaatgtcagaatataaaggtttctatttcactaaataattggtgcaattttatttgagattgccaccatctaaaactgatttttcaataaattaactttgcctagtgaataaatgctcaaatggtaagcagcttcttcagctcttttttatttaccttccccatggcattgcgagggagtttatcccacacgattagttgagttggaatcttgtaaggtgcaattttgtctttggcccaggtggataattcttctatgcttagaacaggctttgattcttgatctcgtttcagtttaacatcagcctgtggcacaacgattgcaccaacaatctct

SEQ ID NO: 21664 - DNA, 528 bp, Glycine max
  Clone ID: jC-gmro02800029g04d1
accaacaaaatatgacattcattccatttaagatggttcataaaagattagataaacttaacatagtttaatagtttaatactacgagtagagcaattaagaaactcaaattgagtcaaacacaactattgtggtcaaagcccactggttccatgttacaagccatctaagcagtagcagtagcactagatagaaaagcttgtcctggttgacggtttgccagtggtccatggcacccaagaagcttagcattcacaccatcaggcacaatcctgctctctgacttgtacttgagataatcagcacggcttaacttggtgaaaccccatttccggctaactatgatcttctgacgaccagggaacttaaacttagcacgacgaagagcctcctgtgcatgatgactgttgctgtccttgcagcggacagtatgaagaacctgaccaatggcgactctagcacatgttccctgtggctttccaaatgcacctctcattccagtctgaagcctatcatctccagcacatg

SEQ ID NO: 21665 - DNA, 513 bp, Glycine max
  Clone ID: jC-gmro02800029h01d1
attaaagctaaatatcattaaacacctttcaaagtcttaagacataactgtcctagctctgtgaatcagaactcaaattattggcaaggtctttatcataccaagactaatgttccaactatcaacttatatatcacaccatataccgcgcacccaaatctcaatgctcaaactcgtgtggatctccaggttttttccacttgaaaactttagtagggttcaacgggggtacggaagttagctccggcgtacactgcttcagcaccaagctcctcctcaattctcaagagctggttatatttagcaagacgctcagacctgcatggagctccagtcttaatttgacccgtagccaaaccaacagaaaggtcagcaatgaaggtatcctcagtctctccacttctgtgactggccatgacaccccatccagcttttttggacatcctgacagctttaatactctcagtcacagaaccaatttggttgaccttgaggagtagagcattgcatgct

SEQ ID NO: 21666 - DNA, 461 bp, Glycine max
  Clone ID: jC-gmro02800029h05d1
agagataaaggatgcttgcattctagacatactatcaagagagtcaatcaagggagagggagtaggcttaagtcaaaactaagatcatagtttttcctctcttaaatctagcattgcctgctctataatgtagcattctaattacgcaatggtaaacatagatatcaattaaaacatgtgctacataagcctccttatcaactaaataagaacatggaaggttagtacccaaaaaagtaaaaacatggaagttagaagccaaattcgcacacaacaatacaaagaggaggctttactaaactaaattcacttctttcttttctttgggggctgcaatgcttcctcatcttcctcgtcctcttgattctcctcatcctcagcaccatcttgatactcttattcacctgcctcgtactcttcgtcatcatcatcgtgatcctcatcgtcgtaatgttgatcat

SEQ ID NO: 21667 - DNA, 449 bp, Glycine max
  Clone ID: jC-gmro02800030a02d1
ggaggggaattaacttatttttatctttggcataaacattactgatgaaagccattggtagattgaatcaatgacaaaaaagagtccaaaagcaatgaacaaaatttgtctgtacagagtatcaaaaacaaaatcccaatcccaccttttttcttaaaaaaaacataaaatgaaaattaacctaactgggttgaattcataatcattttcgggatataccagcaacaaattcaatttcaatcaatttaaaaaaaaattgtggaaacaaatctacgcggtttcattatcttccactgtaaacaaacgcggcctcttgggggttaccggcaacgggctttccaccttttgttcaccggctaccttctttttgccgaaataaaaccccattggggaccaaaactccgttagcggcgccggaaggttcaggtcaaacccacggatcgtgtggg

SEQ ID NO: 21668 - DNA, 442 bp, Glycine max
  Clone ID: jC-gmro02800030a03d1
aacaccgaaagtacatgttttattatagggtacactagtgagctgctggttcttattcactaggaagttacaagacaatacaacaaacatgtagtcacagtttgtagtagctaacatccatagtgcatttacgccctgtcatctttgttttcagcaacaaccttaactctttcaaggcagagtgtaaggtccacacttgttaccaacagggcgattagccaggttacaacgcttggggatggtgacagcaacttgagggttgacgccagccattttggctgtgttagagagaagaactgcacagaggcaactagggttctgcccaattttcttcacctgagcacagcaactctgagaaacactagcattctcatcttgtgctgctgaggcacatggtgcaagcttataagcctcattatcaggggttgtagatataccacat

SEQ ID NO: 21669 - DNA, 459 bp, Glycine max
  Clone ID: jC-gmro02800030a06d1
agtgaagaaattctagccagtatcattgattaaaatatcatcaatacactttaatgtactaattttaatatggagtaataatttccaattaaacctttttttatcattaattcctttctcagtagtcatcaccccaacaagacacggctaacatatatggaacaatttcccccttcttttttttacccttttatccacttatcctccacctgtttcgggtaatcagttactatcacaagttccaagaacagaaagacgctcactaaaaatccaaagtttgcaatggcttttgcatttacttcactgggcaataatacacataatcgcatatctaaaccgacgcctgtttaaaagaggagaaagacaaagaaacacgttcgttctaactgcgacattatattatttacacgaaaactggtccttcattcactgattcatataatgactccattcacattc

SEQ ID NO: 21670 - DNA, 388 bp, Glycine max
  Clone ID: jC-gmro02800030a07d1
caagttaaccaagatgcctgacaaccttcaaaactttattcaccatcttaaaaaaattaacgaaaggcagaaagggaacaaacataaacctccccacccttcctccggttttactggcaaaactaacaaggatgggtgagacggcctacatcctacaagcctgactagcaactcacggacattgtaaggttggaaccgcggtccatcaaacccatatgaagaaaaaagaggggtaaaaaagtcctaggtctcttacctcccagccaaaccaccgtcctccttcccacccctttgacggccgttttcttcgaaccgtcataactccatttaggtctttgcggccataggggccaaattgggtggccaacttgtccttaactaccttctg

SEQ ID NO: 21671 - DNA, 270 bp, Glycine max
  Clone ID: jC-gmro02800030b01d1
acacacgaaatacatttgttttgtttcaaaagtccaatttttaggaaatccaataaatttttatagaagtttcactggttgaagaataattcaccaaaaataaaattatttttttttctggaaaaaatcttttctatttaagaacaaccggcccctaaatttggtcatggtgaacaaaaataaacaaatatgtgcccaagtgggcttcaactgaaaatacttttactaagaacacttggttttttttcctaaacattatagggaatttgc

SEQ ID NO: 21672 - DNA, 505 bp, Glycine max
  Clone ID: jC-gmro02800030b03d1
agtatcccatccaactaaaatcataaaaggtaaaattcaataaaaaagcatcaaataagttttaaacagataaatggatgaaagcaactacacatttagtccacttcctcaatcttggggccagcaccacttccaccagaaggagcagcataatcatcctcgggtgccccagcaccagcaccacccatgtcaggaccagcaccaccttggtacatcttggcaatgataggattgcagatgctttccaattccttcattttgtcctcaaattcatctgcttctgcgagctggttgctgtctagccactggatagcttgctcaattgcgtcctcaatcttcttcttgtcagtaggatcaagtttctcaccaattttgtcatccttcacagtgttcctcatgttgtatgcatagttttacaaagcattcttggcctcaaccttcttttgtgctcttcatcctcagatatgtacttctcagcctcttgaaccatcttctcgatatcttc

SEQ ID NO: 21673 - DNA, 492 bp, Glycine max
  Clone ID: jC-gmro02800030b05d1
aaagaaatgaatatgctccattttatactctcattccagaccttggaatttatgagctcccaacaaacatgaattgctaagcatcaagaacaaggacaagagaggaaggtgtaacaagtaagaacaatgagagagacattacttccacatgccacattggaatgaatgattccttaggagcaagcctagacgtaattttctcaacctccttggtacccacctgggacgccttggttaacacattgcctggaaccggcggcgtcgctgcaaacaacgttggagcaatggactgagtgccaagcaattgactgttgaccgctgcaatcactgaagctggttgctttccattgttcgtttggaagtgaaccaacccttctgggaacacatatatttcacccttgcttatgctctatgaaatgagcacgctggctgtggacatgaacccaacatctagtgtgccttcaagcacaaacactacgctggtggcacgtt

SEQ ID NO: 21674 - DNA, 458 bp, Glycine max
  Clone ID: jC-gmro02800030b06d1
agaacaaggaagagatataagattgatatggttgttcggagaaatgtcatgggaggataaataaaactctatcttacactgattctaaactgttaactgtgaatcatatgatttgcttgatcataataacatggtcactaataaccactcctggatggaaatggtcgtggtgcacatgcgtataacagcggtgtgtgactgttatgcattgcagggggcgacaacctgagatactcgaaataaaacgcaatctacctcaccccgccgcagaagaatagcttttgtaactatgaccagaagaccatgccgctggatgcgttggattaatcgaaagtggtgcctgccgagatgtcatattcatagatgaagaacaagccggcggggaatattgaagatgatgagaagccatacaatttgtctctgactcttccacctgaccttagagactcacgggaaac

SEQ ID NO: 21675 - DNA, 267 bp, Glycine max
  Clone ID: jC-gmro02800030b08d1
ctgttatcttggttacctgtaaaaaacaccaaaccaaaaaaaaacattggcaacaaaccccaattaaaaaaaacaaaacttgcccccacgggggtgacaaggggaacttaaaagccccgtgaaggaagggggagggaccctataacaacaaagggaagtagccccccccaaatggaaggacacaaccaaaaaataagggggcgaatccaaagccttggtacacaaaagcgttaaaaacccaaaactccaagctgggcaggaaaaatt

SEQ ID NO: 21676 - DNA, 255 bp, Glycine max
  Clone ID: jC-gmro02800030c01d1
gggaaggggagaacccccttttttttttgaaaaccgagagcctccaaatccaataggggagaagttcaggcaatatttacccatagacatgcataaaggctatgtttctcagaagtcccccatttataaggaaaccccccaccctttttaataaaaaaaagaaacgggtgggaatcccttggaaagacaacccttcctcacttgaacgatggaacaaagtgtttggcaccttaactggcccaacccgggttttaa

SEQ ID NO: 21677 - DNA, 495 bp, Glycine max
  Clone ID: jC-gmro02800030d02d1
gaaacccaaaaggtaaaagaaattagacaaccaaccatcaacattatgttacatgtaatactcaagccaaaacaggaacctgaaaataaaatataaaatggctttctctgatgctaaacaaccagcaaaatattttcaggttcagaaaatggatgaagctcccttctctaggagatccaattcttaaaatccaggttgttgagtgaaatagcttttcttcaaatcagcaacaactacttgtggatgcatcagactggggtggcctctccttaaaaatgttctttttaacaccctttgagccctcggctatgaggctaggtgtatccaaaatcttcaaaacaagctcttcgaagcattgctgaacgttaactcgagttttagcactgcattcaataaataggcaaccatattccctggcaaagtctattccctctttctttgtcacaactctatcaccctcctttgttactttgtttccaacatgcatcttgatgc

SEQ ID NO: 21678 - DNA, 360 bp, Glycine max
  Clone ID: jC-gmro02800030d04d1
acaaaccattgttagtaaagattcctccaaaaggtttcatttcctctacaaacaataaattaataaaaggcccatattgtcatcaatgaaaagcattgtgatgattaccttcccccaaaagaatcatctacatgcaccagcagtagcatctccactatccacccaagaagggattgcaattgcagaaaaggggtcactgaagcagcctccactgacaacagtaggagcagcgagttggctcagctcatccaaactttcaaagaagtcatctgaaagcaccatatcagacaagccaaattcatcttcttcctcgtgatccatcacatcctctttctcttgtctgctctcagatttttcccc

SEQ ID NO: 21679 - DNA, 420 bp, Glycine max
  Clone ID: jC-gmro02800030d06d1
cagaagaaattataaataggcaaacaggtttcccaagacagatttgaagataaaatacaacaagatcttatcactaaaaaacaaaaattaaaaaaaaatgacaggaagaaaattaatttttgaaaaattccaagccacggaacatgaccctgctttagataaaaatcacaactctagtttctattgcatgtccaacaattttggtcctcaccttaagtggactttccttctgccgcttgtaaattttagccaaaaaggacttctatacagcttgaactgctttgctaggatgagccccaatggaggaaacaagctttgcatagctcccgttctcatactcctaaaatacagccggaagatgaagctcattattcagggccttaactttagcaacattttctggatctgccttaccatagt

SEQ ID NO: 21680 - DNA, 516 bp, Glycine max
  Clone ID: jC-gmro02800030d07d1
ggtaacaacataaaactattttatttgcagggtgaatgcataaacatataaagtgcaaactagttgtgacagactagattatagatagatcattgcattgctgaaattttctttctattttccaaggaaattcagcaaggtatgatgaaggaaacaatattgcatcggttcataatctaccttatgaagcaagattatattcttaaacaaacacactttggcacaaatatggtgcacattagtaatccaacagagtcagtgcttaatctgtgacagcatgcaccaaacattcttactgttaggcctttcctttggatcatccatagtgcaaaagcatgcaatctctaaaacaagaagcatctggtcctcatacccattccccagcagctttgtatcaatagcctccttgggattctcggaactcaaaatcttcctcatccacttgaccaaactcatctctgtagtgtgctgaataaactcatgagaaggaagcttcccaatgaccaacaccccaag

SEQ ID NO: 21681 - DNA, 489 bp, Glycine max
  Clone ID: jC-gmro02800030d08d1
gaccaaggaataattagttctactcattctcatgcatatcttaggagaatccatatcacacattgacttttcaaataaactacgatgcatgtcaaatatcacaatattcgtcatctttcaaaaaaaaaaaatgagcggtagaatgcgaagtgacattaacattacaaccctttatttcttggaaaaaattacagacgaactaagaaggttcagttccactacatccattagtagcaggaattgccactaattgacattttaaggttggattcaaaaaccggcaaatataaatgtaggaagaagaaaggacaaggacttctacatcactgttatacagcccaaacccttgtccttccccttacctgtgattttatggtcatttccttttaatcaacactgcttcatttaggatcttgtggccataatgtgatgatcactcacttggccatcatcaccttaacgaactcctcgtagtttatttggccattt

SEQ ID NO: 21682 - DNA, 486 bp, Glycine max
  Clone ID: jC-gmro02800030e01d1
ctaaaagaggcaccattcaaaattctcgttttgtttcacacataattcgggtatgaattaagcaaattgttcggtatgcatggagaattcctccacgcccgagcatgcaatttgagtatctctctagctttttccttagccctgtttccactatccacctgaagcaccaagcacaatttcgcgaccacaccgagtttcagcatttcttgaacaacatgtggagtcgcagagaacctcgaaagagacagaataatcttaacagctctatcattcgccaaagtcgaaacccttagaatctttttggacacaatggcaagacctgctgcatggctcaaaagttctgctcttccctcagcacactggcatagcagctccaacaacaccagcatcatctcacaaggctttctctccttgcaatcgagaagaagctcaatcaaaacagggaacagcacctgcttccacagctctgatcctgttcctccccca

SEQ ID NO: 21683 - DNA, 482 bp, Glycine max
  Clone ID: jC-gmro02800030e02d1
ggcaaaactccaaccaccaccatgatattggggcataattttagaatgatcacgctgaaaagggtcaacatcttttttacatttattttaagcttgaaaaaaaacccatttagtgaaaaataaataatttcaatatttatttttaactggtggagtttgtgtcttcaaagctgagaatagacaaaattcaatgaaacctaacatctgtccatgcttatgagcaattagagaaattgaaagatcacactttttaaaaaccgttgacagctcaactagaaaaagctgcttccttataatcttctgtcacattagtttcaccttcatttaagcttggagcttttgggaggagtccaagaactttaaacatgagttgatcagcatcaaaatcattattaggagtagtgagaagcttttcaccagagaatatagaatttgcaccggccagaatgcacaatgcctgctcaagcatggagaatcgaact

SEQ ID NO: 21684 - DNA, 504 bp, Glycine max
  Clone ID: jC-gmro02800030e03d1
ataaaaactaaattactgagaaaataacataaccgatgaaagcacaaagctacaacggagcaaagaaaccaaaacctttgaacatacaagaaggattcacattcacactttttaacttaagcaacacattaacctatgatcttccgctcctttttatcacacacatagcaaaacgcaaagtaaccaaccaaaacgacagagaaaccattactattcccatttggcggttataactataagttattagcgaaaccgttaaccagcgccaaggcattgctggtgaacttcttgaccctagtgacgcgatcgcatacgctcgtcttcacgggaccttcctctacaccctcgaatccgtcagtacacgtttcctcgtcagtgagcgcggcgctcatccacgtcagcacgttgctgagcccaaaccggacggagctggagtcagagtttccggctccggctggtttgagccggcgcatctgcttaagagagccacggatctcgtccaca

SEQ ID NO: 21685 - DNA, 329 bp, Glycine max
  Clone ID: jC-gmro02800030e06d1
gaaagcgtatttggtacgctcataatcgcgggatgattaaaaagaaggcgttggatcataaatcataatctaaatcagacaatctgtatgttcacactcagtcatggacaccatactccgatgatcgcgaatgcacgctataactcacatacattgcttggtcaaccgactattacacttcattatcacctctgagctggagacgcccggtccagtgatcttgaaagaacacaacgcggactcacggtgggggctagattcatttggcaccctattacaaagagagcgagtgtcccaagtgagccaagttttcagccgtacgggtagat

SEQ ID NO: 21686 - DNA, 388 bp, Glycine max
  Clone ID: jC-gmro02800030e07d1
aaaagcctaatgtgtgtatatatatatatatatatataacaagtatgcaacaggagaagagggaagggtagttatgatttctaagccaccaagccttctagagagtaagaatcatgttcccttcctcggcagttgcaagaagcatacaacatacaaattaacatgatgaactttgtgtatcatccaatcttacaggaaatacgatctccacaaatttctttttccatgattaaattaagggagatcgccgtggtgaatattaagatgctgtactttcattatgctgtctctaaaacgcagacgatgatgaaattatatggcatacactatctccccactgctatgtacatcaagctcaaagtcggagtctaactcatccatgtcatca

SEQ ID NO: 21687 - DNA, 341 bp, Glycine max
  Clone ID: jC-gmro02800030e08d1
ggggacaaaattctgataaaatttccattgcatcaacacagtaacattgcatagccaaacaataaattgtgagtatagggagaaaaaaaaaaacgaacagttttggttttgatgagatggccttagacattgaatggagtcgtagtagtagtagtcatgaaacacgccaattattcatccacacccagcaagacatccactgaagggagtgattaacttaacaacactcttaagcttgaggcttctctgacttgagtggcttcacaacttcccaggtgaagtctgcatcatcccttccaaagtggacataaacagctgtcttgaggaacctatgaccaccc

SEQ ID NO: 21688 - DNA, 560 bp, Glycine max
  Clone ID: jC-gmro02800030e11d1
actgcagaacttcttttcattttccaaaggtaatacatatacataatacatgtgcgaaacaagaggctagagtctagaactaaaaatttagtggagcaacaacaaacacaaagcataagttgcacataccaaaaaaaaaaaacattagacaactcaacatcatcattaacatcagacgaaactaggtctccactacctttgccgaggcaatactaatgatatactcaatctcttctggcacctctttcattgaaggtcgagtctggctcttttcctccaagcaacccaatgccaaaaacgccactgccttaatcgtctctagctatataggggaagctgcattcttcaacactggatcaatgacatacatgaacttttcctcggccaccatctgatgcacgtaaatcgccaagttcacatcatcagcagccctgttaaaatctattgccttctgagctgtcaaaagctcaagtagcaccaccccaaaactgggaacatcactcttatcaggcaattggtagttcctataatactcaggatcaaagcaaccagggtcccct

SEQ ID NO: 21689 - DNA, 546 bp, Glycine max
  Clone ID: jC-gmro02800030e12d1
gaaggaactaggaagtatcaaattaatcacttttgccatttcatttttttttaaattttcttacataagtatatgggaaattgcccaaaatgacaaatgaattaaaagagtaagggagaaagagaaaaaaattacaagaattagaaataatctttaagctcttgttgaaggacttgttcaagccacatctttgagccctccatcaattcagggctgagtctgaacatgaagacacagaactccatctggttgagtgcaccgtcaccatcaaagtcaccttccaaaaccatggagcgaagatcctcatcactgagaccctgaagaccaagcaagtaagaattcctcttgaggctctcaaaagtgatgacccctttatcagaatccttcaaaagatcgaacccattgcacagttcatcaattaggccatccccaccaagcttgttggccatcacaggcaagtagtcttggaagttgttttcttgtgcagccatagtggagaaaagaaagagcacagagagtcgtgagagtttaagagagatagaaact

SEQ ID NO: 21690 - DNA, 508 bp, Glycine max
  Clone ID: jC-gmro02800030f02d1
cccctgattgtagacgtcattgtcacttaccattttgtgaatatatctcaaccttttacagttcttagataagttttactatcaataaattctaaaagcaaaattattcattcatctaaatggctaatttgaagaggtactccaaatccctgcttgcattaacttaggagcaccagaaaatcagcataattccaaatgtcatggcatggtaccttgaaccttcaaaagttgatcacatgggttttctagtagttttgctgaagctgaaaatattcaagaacttggcaagcatacagaagaggcagccttctttatacgtgtgaaacaaataagaaaatgaatttgtcttttatgtcagccaccataggtaaccaaaactttaacttcatcaatgtgctatgcatctttgtcctttgaaatggagggagcttgttatttgaatctcatgtgaacattcaagttggtcttattcctcagaaaccttgaagaagggatatgataatataat

SEQ ID NO: 21691 - DNA, 427 bp, Glycine max
  Clone ID: jC-gmro02800030f06d1
ggggttgtgttttcttttgggatttctttttttttttctttttttttttttataaaagtgtttttccccccccggggcccaaccaggggaaaaaaaaattttgtgcacccccccaattttttgaacctttcctaccgaagcggagtttacaaaaaaaacccccaaaaatttttgttaattacagcagccggagagaaaaaacacgctttttttggaaccttattaaaccggccaaaacctttaaaaggcccccctttaaaaaagcagggatattccaaaacccggccctttgccaagtgtgattcccccaaatgtgccacgtttggcccccgcctttatttttataaaaaaagtgtgacaacaccgacccccttgtccgcccaaagggggcccaaaagcatgggccccccccttgaagcgccccctt

SEQ ID NO: 21692 - DNA, 283 bp, Glycine max
  Clone ID: jC-gmro02800030f07d1
aaaaaaaaaaatttttctcctccctttttcctgggataaaaaaaacaaaaaatatatggcccttttttttaatccccccccctttttttaaaacccctaaaaataaatataaatgttttaccccttgttttttcctcccattttttttttggcccgcggcccattaccctaaaccctttttttttggccctttttccctgtaaccccccttttgtaatttaaaaaaaaaattataaatatttctttttccccccccccccccgggatgcgccccccccccccc

SEQ ID NO: 21693 - DNA, 528 bp, Glycine max
  Clone ID: jC-gmro02800030g12d1
gtaaaaataaccatcaaactaaaccatattgattttagtaaatggtgtcgaacaaaaccacatgcactttaataaagaaaaattcaacattggctactatgtcttggggaaggctgagagagataatgtcttacacattaacataattgacataccatagcggaaatgggttccatttccaaaacctaacaaccgaaaattttcaatcattgtcaaagaaaagtctggttaacaaaccattgaatctcccttcttgctaaaagagcacccttcggttaaccttgctccgtccgcctgttggttggcacaacacagtctggcaggttccgcaaaccacaacagtctgagagtggctaaacacagttgttatgttgaagcagccctggcacttaacatccatgaagaaagagtttggtgactgcacaagacgcttgagctagtgctttctcttctccaactcagctggaggattcagcaaatcaatatcgatctgtagaaccattgtaagaaagaagcgctgaaaacctg

SEQ ID NO: 21694 - DNA, 335 bp, Glycine max
  Clone ID: jC-gmro02800030h03d1
aaaaaaaaaaaaaaattttttcttcttgggggggaaaaaaatcttaaacatacccgggggggggtataaaaaaaaaaacaaggggggatttaggggggggggggtatttcacaaaaaaaaaaaaaccccccccggggggggggggggtttcttcccccaaaaaaggggggggcccccccccccccaaaggggggcacccggggggctttggggggttttcctttctttagggaaaaaaaaagggggggggggggaaaaaaaaaaaaaaaaaaagtgggggggggaaacccccctcccggggtttatatgggggtaactcccccccggtggggggg

SEQ ID NO: 21695 - DNA, 420 bp, Glycine max
  Clone ID: jC-gmro02800030h05d1
gaaacaagaaattttattgccatcgcagctcaattacatttagtctccatcttgcatctgtgcattatgctatatctgagactctcttgcctgcttcacatttctatagcaaaacgtataatagaaacatctaacgaccaattcgtacacaaggtacacgtgcaattacaacaggggaagaagaaattggtacccataaaaatacactggaccggatcgagctgagtatacataccacaagtgacaataacatattgtttattacactgatcttaacacattgactgtgcacagttccaatttattaaaaactattagatcacataacaaaaacaaccatgaattgtccagatttaattgtcaatagatcatagtgccgaaatatagcatatagaacttttgaaaaattcatcactaaag

SEQ ID NO: 21696 - DNA, 493 bp, Glycine max
  Clone ID: jC-gmro02800030h06d1
cttccttctccttctcttcgtcaacatcctccaccttaccctcctgatccttcttctcttcctcatcctcatcatcagagatctccttctcagtagttttctcaatccaaagagaaattgggtagctaatgaactcagaatgcttcttgatcagatccttcaagcgacgctcctcaaggtactcaagctgatcttccttgaggtagagagtgatcttagtacccctgccaagaacctcaccagtgttatccctggtgacagtgaaagaacctccagcttgagactcccaaacatactgttcatcatcattgtgttgggttggaacaatgaccttctcagcaacaagatatgcagagtagaaccccacaccaaactgtccaatcatactaacatcagcaccagcagccaaggcttccatgaattccttggtaccagatctagcaattgtacccaagttgttcaccaaatcagctttggtcatgccaataccact

SEQ ID NO: 21697 - DNA, 450 bp, Glycine max
  Clone ID: jC-gmro02800030h07d1
gttaattacataacctatttaatctctgtgttgcttctgtttatataaaccaattccttttaacatacaataaggatttacatttacactttttttcttaaaaaacacattaacctaagatcgtccgctcctttatataacacacaaaagcaatctctaagaaaccgaccaaaacgacagagaaaccattactatccccccccggcggttataacgaggagtaattaggcgagcgcgtaaccaacaccaaggcatttggtggtgaacggcccccaccataaaaacgcgatcgcatacgctcgtaaaaaaaaaaaacatcctttacacccccgcctggcggaggtcgcgtgtcctctttagagagcgcggcgctcatacacttctgcgcggtggtgagcccaaaccggacggtgctggagtcagagttcccggcaccggctggtttgagcc

SEQ ID NO: 21698 - DNA, 563 bp, Glycine max
  Clone ID: jC-gmro02800031a03d1
gaagaggtcattaaaataagagtgcattcaaacatacaggcaaaacaaaacaaaaatgtaacgggcatgactacacaagcctttcccaaaactacaaggaattccccaaaagtttctgcagtgcaggtatacacaaataatggtaatggaaaatgtacaaagaaaaagaatcagagactattatatatacacacgcccatctcattgaactttacctgatgagattatcttccaacaaccctcatttgataatttcaaaaacttaccctctcttcatcaggtatcacagtcaaaagggaatattttactttcagtgatattttagccttctccacaaaaagccttgccccagacacaacccagtagccaggagtatcttgtggtcctcttgtcatttcagttgtgtcaacaaaccttagaagtttgggtgactgagtaggcacaggaggccccccagggtataaagcagagttgatgtttacatcacatggccgcggtggcggcggcttttgtggacttgagaagtagtgctgatcaatgttgagtatattccagatttctgg

SEQ ID NO: 21699 - DNA, 340 bp, Glycine max
  Clone ID: jC-gmro02800031a04d1
gccctaaggactgccatatcatatcctagtgaagttaatttgaagtgatcgcccccacacaaaggcactgcttctccaacttgttgctccctcaaacaaattggactagagcaagatagtcattcaaataagctaaaaggtaataataatataggtgggtatcctctttggttattactatgatggatgagcagtttcatttccaatggagggacttgaaatctttattggtgcagcaatggcacaatgctgctggagatcagtcaaggaaaatgatctccagggagagaaattccgcaaggaagacactctgtttcgcggatggagcggcggttatgga

SEQ ID NO: 21700 - DNA, 434 bp, Glycine max
  Clone ID: jC-gmro02800031a07d1
attgaaagtactaattgcattaaaacatgattgcaaattgcacacattcatagcttttgaagggccgctaatggacccgggatgcacacatactcaaagttcaggagcatatttaaagaaacgaccagattatagactttcacttacttcagttcacaccaaacaagggacctgcagaccattctcatactcaaaacccaccacgaagacacaagacaaggtgaagagcagactctttctgagtgttgtaatcaacaagagtccttccatcctccagttgcttcccagcaaagatcaacctctgttgggctggggggataccttccttgtcctgtgttcttgcctagacattatcaagtgagtgtgaactctcaacctccaaggtgaatgttatcgctgtcaaaggcttcacatagatctgcatacctgccctc

SEQ ID NO: 21701 - DNA, 590 bp, Glycine max
  Clone ID: jC-gmro02800031a09d1
agatgaactttgccttaatattgaggtagaagccaccaagcatggaaaaattacagcatcacaaattcacaatacaagctgagatttacaagaaaagtccaatcaataacgtgcactgacaatgagattcactatcaatattagcacgtcttcatgtataataaaacgagtggacattaagattttccgtatcagcataatgcatactgacatccataataccatgaatacaaattctttcatagaaaaggggggcattgactagcctgaatgttcagaaaacctaactaagtagatcttccaatcatgagagacaagtttcagtctgcacgagagctactgctccttgcagaagatttattaccgctatacttctgcttccccaagttgaaggggatatatttgtatctgatcatgtgagcaacttggcgcctcattgtaaggacaaagagaacaaaccagttacagagttatatatgccaaaagacaggaacatcatacagggaaaaaatggtcatcacaaacgctatgcagagaaccttggtgaaagaataccagaacttgaactccggaggcggcgaatgaagggt

SEQ ID NO: 21702 - DNA, 542 bp, Glycine max
  Clone ID: jC-gmro02800031b04d1
gcaagggatgattcatcccacctttttcattcagaactcaaatgttacgatccctttacaaatacataggtgtacatttaccgagcatactaaattaccgttttgatcctgatacattaacattaaatgtccaatgaacaatatgtaagaattatatgatcgatgaacagagttttaaatcttttctgaagcaacccagcccccgggtctcttgagagggggggagaaaagaactcatacaaagaaatctgtcaaaaataaaaagcattggaaactggcatccaggttagttgatcatcaatatgtcgcgcttggtgaaagcattaactagctaatgattatagtttgtgtttctttttcccctctccatgtcttgacctcctaggtgcctcgtcctcactttcactatcatcattcctgaagttgttcacagcaggatgatcatcttggttccctttgtatccttgttgatactgtgcgtcatcatcaggtccgccactttgactgagcatgtcttgactcttaccctgctcggatcctga

SEQ ID NO: 21703 - DNA, 471 bp, Glycine max
  Clone ID: jC-gmro02800031b05d1
aaaggagcacggttcactcaatgggggagccgggaaaaagatagtttttttttaccaattacagaagagactggatgcaaaacaaaacaaatcaaacccaaaacccaaaggttttcaggggggggctctttttttcttcctatcctttggggcgggattagacaggcaaggggggggcgaattaatggcactgcccacactggtctaagtattttcaccctggtaaaacatggtggctagcccctttcttgtatggtcttttaacacgaaaaaaggtggccaagttaacatctaaacatcttttacggggggacgctcagcattgggggcacgggaaatggggccctttttacacttttttgagcaagggctgcaaagaacaccaggcctacatgggagcggtacaacgtttatctctccctcgaaacaaactttggataacactttctcatttggaaggctttcataccc

SEQ ID NO: 21704 - DNA, 600 bp, Glycine max
  Clone ID: jC-gmro02800031b08d1
gataaaactaaaggaacataactaacaaagtaaaactccttttgaaatgaacattgttcaagaacaattagatcaaagctcaatgcaacaccaaggatgccacaaaaccctcttatttcgaaacctaacctatattaagcctctacaggagcaacaagagctctctcattgtacctcaatccactgttggctgaaatccaaccataataataatataaagcacaaattacagaggaactagtgatgtttactcaagcatcatcaagggcaaggacaccagggagttgcttcccctcaagaagctctaagctggcaccaccaccagtggagatgtggctcatcttgtctgcaagaccaaccttctccacagcggcaacagagtcacctcctccaatgatggtcgttactcccttcccactcagctctgccagtttcttggctatggcctctgttcctgtggcaaacttatcaaactcaaaaacacccattggtccattccaaatgacggtctgggtcttatccaatgcttcaccaaatgtcttgatggtaatcggaccaatatctaatcccatccacccgtctgggatgcttgattgctgc

SEQ ID NO: 21705 - DNA, 399 bp, Glycine max
  Clone ID: jC-gmro02800031b11d1
aataaacctgttcgcatgttgctaagtatttcgcgagtatgtggactatacatgggtaatgcctcatagggagaagtttgcaaaaagatggactcatccggctatggccacttgtttaagtcagcaaatacactatcatattcatcatcccgctgatcgcggaaagaaagcatcttgcttacaataggatatgcacaaattggtgtaagccatgtaatgtaatatgtctcaattatgtaacaaatggccatagacctgaagtgtggtaactttggttgcttgccgtgcaacaactaggcaagatgacttgcttgagatccatggatcccataatcatatgctcggggtacatagattgcatgcgccagttaaccgtgactgcggccatagaacaagtgt

SEQ ID NO: 21706 - DNA, 376 bp, Glycine max
  Clone ID: jC-gmro02800031c02a1
cagctacgaaggaggctaatattaaggcagggtccctatcctatgactgggacgggggatcatctctgcttgaggcactagaccagattcgtgagcccatgaggccctatgacaagcccctcaagctatcccttcaggatgtgtgcatgattggaggtattggaactgtgccagtgggacgtgtcgcgaccgcagtgtggaatcctgtaatggaggtgactgtctgcaccaactggactgacaactgaaggcaaatatgtggcgatgcaccatgaatgtattacagaggcacatcctgctgacaatgtgggattcactgttgagaatgttgctgccattgatctgagcgtggctattgttggcttaaactcaaaga

SEQ ID NO: 21707 - DNA, 331 bp, Glycine max
  Clone ID: jC-gmro02800031c02d1
gggaaccccccaaatagaagggtggcgtttaataaaccaaagcaccccacgccagcaaaggcctgaaactcggtgggcttaaaaaaaatgtgatcgggggttccgcccaaccccccccttttaaaccccgattattaaaagctattttgcccccggggataaaaaacccagtgtggggaacaacattggcgagatgatggggggaactttaaactttggccgaaaaacaagctccctttaaaagaaaaccccggggccccgaaaagaaaccccctttttttgtgcccaacatcccctgttgaaccaccccgcaagatttactttttttttt

SEQ ID NO: 21708 - DNA, 460 bp, Glycine max
  Clone ID: jC-gmro02800031c08d1
ggtaatatattttagtttcttatttaatcaagataaggggaacttctttagaaacaagtttcccagtacatgtaagatcatggtagatcctttattacatactatttattctctatatggatgatatatgtgagcaatttgcttaagcaaatggcctttgattgttacaatccaagttgtctccggggcttattcccatcatctggcagtaccttcggtagaagccgatccgatcttggacccgattatcctggccgtggccgcattcgaggccaccgttgattatgttggtgatgacaccgtagccaggagcccgacccgctgagctgtcagcactagatggagtccatcttccagtgatcacatcatggcttgatggcttgtttccctgtgcagtcatccaaaaccatatggctgtcttgaatgacacggttgcgtctgtggcttcaagatccggatt

SEQ ID NO: 21709 - DNA, 443 bp, Glycine max
  Clone ID: jC-gmro02800031c09d1
cttgaaaaaaagggagagggggggttttaataatggagaggcccccaaaaatactgggtcttatttgggaatatatttcccgagcgcatgcaaacaaaaattaatgggcccgtgctccataagtggacaaacaaacattggaatatgaacgacccttttgggctgggtcactccaacccttggtttttttttaaaattacctaccattttttggtggttgcctaaaaagaatctatacagagaaataatgagattcaataaattgggaacgaaacaatttaaaaacggggggttttttactacaccggtgggttgtgttggaacaaattaatcactgtaatttcccaaactgggacaaagtacaaaacccaacactttgttaatttatgtaacgaaacgcgcgccggcatttcccggaaggtttaattaattagcgggggaac

SEQ ID NO: 21710 - DNA, 475 bp, Glycine max
  Clone ID: jC-gmro02800031c11d1
aaaaaacctagataaattcaaagaaacactataaattcacttttgcacacatacacattcacatagtcccctacatatggctctatgggagaagttacctctcaagaggagtgaaattgtgcgtattggaggggagagtgctacaccaattacaatccaaggtcaatttacaattaattgggaggtactacatttacaacaacaccccatgaatgcagaaacggaagaagcatgcacaaaactggaattagaagttccgatcaaaagtcatttgtcccctcacaagctaaaacctataattattctcatttatttctctcttttttgggcgaacaataatgacgagatttaaacctataatctggtgcaaactacacaaatctccccactactaggccggccctagtaggtttcattcctttcttattattccacaattatttcaagtattgtagcaaggctgggtcttttatat

SEQ ID NO: 21711 - DNA, 502 bp, Glycine max
  Clone ID: jC-gmro02800031c12d1
gcaccaaacaaaattcaacttaaatgttcataatatataagagttgacattagtggccactcaaaagaagacactcagttgaaagtaaaatcttaaaccttcagcctgtatactaagatgaaaaaccctaaacagcagcttaaaagccaccaaagcccaaatatttggcatgatcaagtgaagttttggccaatatttgaccaaagagtgaaaccaatggtggttgtaaccgccacaccatagcacaaccgcactaggaaatataaaaagctgctagactcaaaatttgtttcatgctggagacaagtccctatctaaaagacctatccactcactaactgtacaagcaaccgaggacaagaagaatgcccttggatatagttataccacgattattagcatgcaccaaacacttgatatgaggcctaacaactaccatccacatacaccccattgccattggtatatataccatttaaggaaccattggatgaattgaagc

SEQ ID NO: 21712 - DNA, 544 bp, Glycine max
  Clone ID: jC-gmro02800031d02d1
agaacaacaaaacttcattggatggtccaacatgatcatacattagcaaataattggtaatttttagcatcaagaactatctgcctaactgctgcaactgctgctatagctcccaatgcggagaaagccacaacaattatcacattcaaccagaaaacagggcttcgcttagatggcttaaatgtcaaattgtagaaaaccattggcaagatgaagtcaagtgggataaagccaaaagctcctataagagagtttatgtctccaaaaaatggaagcatggctgctatagtggttgaaatagcaatagctaatgaccgagatatcactctagggattacattgcgtttggagaactcggggctttttgggtctccaaatgtttgctctagcacttcatttgttggttgcaaataaaccacaccaaccgcagataattgtgttatagtgaaaatgttggtcatgtaaatgaaccacttgggcaccagaggcttcccattgtccacgaagttgcttaagatgaggccttctgattcattaccaaatg

SEQ ID NO: 21713 - DNA, 494 bp, Glycine max
  Clone ID: jC-gmro02800031d05d1
agatcaaatatctaatcttacatactagtatacaaagtgtagaaccatacaatgaatactgaatacatgatatatatgaacatgtgtaaaagtgttccaattacttaaaagagttgggaaatgttcaaagaaagctatcccaccattatgtatatcataaaatgatcaatacaccgcgtgcgttgtctcgattttacaaggcgcacctcccattccagaaaacatctatatctagcaacaaatgagaaactcatgttacaatttgctcaaaaccaaccaaccaacttgattgattaaatacatccttgtatgttcaaaaaggcattcttataacaagccagtgcttccaaatggattgttgttctgtgggtgaggaacaggattggaggcaggaaatgctccaaatcctgcatctccaaagggatttgctgggttcatcaacataagctgctgctgctgctgcagctgtggctgaagctgaaatggttgttggt

SEQ ID NO: 21714 - DNA, 437 bp, Glycine max
  Clone ID: jC-gmro02800031d07d1
aacattcttgttgtacagagcataattgtaatgggcatgactacacaagcctttccaaaactacaaggaattccccaaaagtttctgcaccgcaggtatacacaaataatggtgatggaaaatgtcaacgatgaagattcttatactactatatagacacacccccatcccatggaactttgcctgaggagattatcttccaacaaccctgatttgataaccccaaaaacttaccctgtattcatcaagcatcacagtcaaaagggaatattgtacgtgccacgatattgcaaccctctccacaaaaagccttgccccagacacaacccagtagccatgagtatgttgtggaccccccgccatttcagttgtgtcaacataccttacaagtttggggactgaggaggccaggaggccccccatggtataaagcagag

SEQ ID NO: 21715 - DNA, 523 bp, Glycine max
  Clone ID: jC-gmro02800031d08d1
attataattcccttcaacggagggcttgcggcctaaattttgatggaatcagcacttttgccacgatgattgtttccagaggataaagtacagccttgtcctattacccggtaacggaagccaaacctaatctcaaagaacactgctactacattagcataagaaattaggattaaatcgctctccactgcaccctgcaatttgtttccatgatttgctagcattctgcatctggctataccatcttcatttccatttttgaaaaatattggaagttcatgaattatacaagtggcatcagaaaaggtgatgatttttcacgtaaaatacgtgagccaaaaggaatgatccctaaaaattcatgccctctgataaagcaaccactgtacacaaacaacctaaccttacaaaaggggtcttcttctttacggggtgagggcgattcctgaaaatggatgaaggatcattctccaactcaagtcaaatcaagctttttctttggaagatgatgagagtaaatgat

SEQ ID NO: 21716 - DNA, 403 bp, Glycine max
  Clone ID: jC-gmro02800031d10d1
atgaaaggtgcttttctttcttgagctggcaaaaatgctgactttgatggatccctcttcctattggcacacataattatggcctacctatgtgccgtctcaccattacagttgtccacccatgctctttcccttaatactgctcggcgcggaaaatgtctatgacatggggatgctctttgttcagattttaaaatctgccgattccacgtttactttgaagaccatgcacgttgatcgctgtgagtgtcctctgctaaaattacatttcggaaccattctttaatcttctgagaggcgtctagatccacgtactgtagcttacctctttttcagcctgtctgtgcatgcgctctagcatcctatctcatatacgttgaattctaagggcagaagtcctccc

SEQ ID NO: 21717 - DNA, 539 bp, Glycine max
  Clone ID: jC-gmro02800031d11d1
ccatacttcaataagattgacattaattggaaaagaaaaataaacaaatgatacgtttgtacctggtacacttcatttcccactaaggaataattattttaaaaaaagtcttcacacaacaaaggagtaagttaaaagatttgagctcttgtacccctaatatttaagacttttgcccaaaagaacatcacgaaccatgttgtccaaattagcaaatgaagagccaacagagcgaagagcatcactttctgccaattccttccattgcaaagcttttttcttcatctctttacccttttccccatccatcaactccctcacaagggtctctattttttgcctctcaacatgttcaatctccaacccaatcccccaatccttgcaacaaaaccgacaattggtctgttgctctgcaaagaaaggccaacaaatcattggaacacctccacacatactttccaacgttgaattccaaccactgtgtgtcaaaaatcccccaactgaagggtgagccaacacttgctcctgggagcaccaac

SEQ ID NO: 21718 - DNA, 400 bp, Glycine max
  Clone ID: jC-gmro02800031d12d1
attataggaaagaaaataaccgtgttgcatttgggcttggggcttggggagtaatgaacttcaagacggatttacattacgaccatgcgaatcaaaacaaacccttcttaacttacctctactgctgagacggaaaaatatgcacacgcctcatgaatgaaactgatggaaatatctagaggctagcaataaacacagataaaccagacagtgacgtgcgcctgagaccaacaatgatgactttggagcctctcaacgaccagactcatgctaggtatcacatatttctcttcctgcacacattccaaagccactgtcgtcaatatctgcatctgctgcacatcataatgtgatcccaacgcagggtcaacaatttggcccacccagcattccccttctc

SEQ ID NO: 21719 - DNA, 470 bp, Glycine max
  Clone ID: jC-gmro02800031e03d1
attaaacactgggtttttactcattgcattacctgcagatgctagaaatattatgttcgctggctaaatggaatgtgccacgcttgatatctgaaaagtatatactactacatcaaaatttctcctgtgaaagacagaatataaaaatctaaacttacgcttccccgctaaagaataaaaaataacaaaacacaaatgaaacatagaatatgttgttaggggacacattgtatccatcttgaactcgaatcctccgtgggccttaaccaacataaactgtttgttcattcacgactgaagtattcatccccacgcgggcgtcacgcagatatgatcccacaccgagcagagtgaaaacactcaatctccaaaggcccttctgagcttcaacatctcttttcaccccaggtgccggctcgcccaccaccattggagaaactaccattcctgccttctccacccttttcacc

SEQ ID NO: 21720 - DNA, 527 bp, Glycine max
  Clone ID: jC-gmro02800031e06d1
attgcggcataatacgctgaaatacctcaccctctttcttcacacacaaactactaccattactcaaagcccacctgatttctctattttcttccaactttataattgagcaagggcttcaaaggattcgtttcacactcataccttgtttattctacaaaccaaaacacaaagataacgtactaaataagtgataggtgatgctgatttccaattgtccacaacttatatagtagcatcaagtccaagttctatggccttgagtttcaatgatttcaagcaacgaatggcttcatcaagaagctcgattgggtccttgtcctttccaccaggaactatgcattgcaggatgctcagaacatcttgaatcttctcctttctcatctttttattgcctgacaaggaacccattccacctgaccctctactactactgttgccaccactagagcatcttgattcggcatcatcttcgacttcaaagggtctttttttcccattcagagaactagcagtgtccatgaact

SEQ ID NO: 21721 - DNA, 297 bp, Glycine max
  Clone ID: jC-gmro02800031e07d1
caaacaacgaaaggggggttgttttattttggacgcctatttaaaaaacattgtccccccaccaaatgctgaacctcccccctaatctgtagtgaatgaccgactatcattttgctatggaaacaagcttttaatggcttaataatacactctatacatgccgggccttctcattttctcttttggataagtgccaccactgtaacctccaaaatgccctaaacgctttctgcacataagggggaacggaatccggtttccaactctgcttcaaggtggggctccctcttccactgt

SEQ ID NO: 21722 - DNA, 537 bp, Glycine max
  Clone ID: jC-gmro02800031e09d1
acatatatctagtatcattttacatgaaattcaaacagcaataactcaacaagacacaagttgttcaacaaatatccttaaataagtctattttgaagcagaaagactttcatagcgggctttgaagtaggcaaaaagtgggtctctaggaggaaggacttcgtgcacaaaagggtggttaaggaattcttggctccatttgtagagtataggaaatttctcactggtgaataactgcaaccctgctatttcctgaaaaattgggatccaaaatgctatgaagacagcagcaatatctaccaacccaaattcctctcctccaaaaaactttttgtccttcagctcattctcaagaaactgaagagcctcatatgtttcttcaacattcttctcacgctctttctcatcaaccgtgaaaacagatttcgatacagcacccacaatcttatcatcaatgaatttggaccagaaacgagcccaggctctttggtaggatcagaaggcaagatggggttgttcttccatgtctcatcaatg

SEQ ID NO: 21723 - DNA, 371 bp, Glycine max
  Clone ID: jC-gmro02800031e10d1
aacaatagttaaaaccgattatttttttttttttcagggaaaaccttacataaatggaaaagggggatcctttcttgggaacgggggaaacccaagccccccctaccaaacaaacatgggggggggaccaaaaaagccggcctaggccttttttgaaaaaaaaaccgaagggagaaccggtttttttttattaaccctttgggagagggaaaaaaacatataagggcttggggccccaaaattccggaaaaaaaacaaactggcccaaatttttaaaaacagggctgttttccacggggggataagccccaaaagccccaagggctttggggggggaaatctcaaacaccggatctccctttttttggtgg

SEQ ID NO: 21724 - DNA, 533 bp, Glycine max
  Clone ID: jC-gmro02800031e11d1
ccatacttcaataagattgacattaattggaaaagaaaaataaacaaatgatacgtttgtacctggtacacttcatttcccactaaggaataattattttaaaaaaagtcttcacacaacaaaggagtaagttaaaagatttgagctcttctacccctaatatttaagacttttgcccaaaagaacatcacgaaccatgttgtccaaattagcaaatgaagatccaacagagcgaaaagcagcactttctgccaatttcttccattgcaaagcttttttcttcatctctttacccttttgcccatgcatcaactccctcacaagggtctctattttttccctctcaacatcttcaatctccaacccaatcccccaatccttgcaacaaaaccgacaattggtctgttgctctgcaaagaaaggccaacaaatcattggaacacctccacacatacttatcaacgttgaattccaaccactgtgtgtcaaaaatcccccaactgaagggtgagccaacacttgctcctgggagc

SEQ ID NO: 21725 - DNA, 490 bp, Glycine max
  Clone ID: jC-gmro02800031e12d1
aatctcattctccgacgaacattcactaaaatttagaaatcacaaatcgtaggagatatacatatacatagttacataaatatagactagtagctaaacaattaataataacacttttctgtcattgtatttgtattccaaaatggaaattgcataatcaacattcccagccgagccataacgcactaggatcaagatcgtactgaaacaaaataaaaatttgagaattttttggttaatatatataaacttatataaagtattcgttgctattattatatattcttttaatctacaaaacatcaacctctatacaaaggagagtgttcttgaaccactttagagaccttggattgtcggaaaggcttcatcggtctcggaaagaaccaccctttccccttcgtccgcggtctcaattctacggcgccagaaaccctcgctaccgtcgtcacagccaccgaccttgaccgtgccatcaccggatttatgc

SEQ ID NO: 21726 - DNA, 548 bp, Glycine max
  Clone ID: jC-gmro02800031f02d1
agtcaacaagcttaaaaattgtgacattataatacaatttcttgcatgagaccatgaccgatgtcttgcaaagaaatattcacaaagtgacaatcaattcccttaccatggttgatttacactgacaaaaaaagataaaacattcattaaaagtaaattttgtttcttcataaaaatcatgattgtgcagctaaaggaggagcatgatcatcccatggcatacttctgtgtccagctacgagcagtggcttcatacttagccctgtcagtcttgtacatgtgggcaatttcaggcacaagcgggtcatcagggttgggatccgtcaacagtgagcaaatggacaaaaggaccttagaaatggttagtgctgggctccattgttcttttagaatgtcaaggcatatacttccattactgttgatgtttgggtggaataccttagtcctaaatgcaacctttggtggcttgaatggataatcaggaggaaaatgaattgaaactaggaatacaccaccggtatatgggctatcaggaggtcccatgattg

SEQ ID NO: 21727 - DNA, 439 bp, Glycine max
  Clone ID: jC-gmro02800031f03d1
atcgcataaagtatcggcccttcggttcatttatactagctagcaaaatatcttaacatccaaacatattagaacaaagcttaaaaataaattaccgggtaataataaaacaaaaagtaaggggtcccctccacatccagccctacaaatgtgcaattctgaactttgccaaccaagtaaacaacgaaacatcttcaaggggttaacttatcttaaggcgcccgcaaagataataaaaattggaatctacagccttgaaaataaaccgagattttaaacctacagaattcagccccaccaaaacattcagctaactctttttttgaatgcaagaagataggtaccaggaacttgagcttcaacatttctggtgatccaagaaactagtgcaacagctttttaccaaacacgataacattttcacaaggaccaaaacata

SEQ ID NO: 21728 - DNA, 522 bp, Glycine max
  Clone ID: jC-gmro02800031f04d1
aaactcaaacattttattgtactatatcaaacacaaaacagaacaactacacggtaaagaaatacaaaccacagacattttacttattacaataataactatttgtaggtcaattgcctacggtgattgacatattgaagtaatcaaatatccataattagcgtcaaataatcgtccatatttcaaatctagttattggtgtcataccaagattgcttttgaagataatcaattgtgctcttgtccacctggaaggctttggtgagaacctcaggagaaataggaggattagctttaaacaaagcatttgcaatagtgatagttcctggattttggctactaagaccagcaatggcaacagcattaccataccccacattgagttggaaatgaatgagaccaattgggaagacaaacacatcacccttgttcagcactttggtgaagaggcgatttccatcttgattagaagtcacaaatccaacataaagagttccctcaagtactataaggatctcagta

SEQ ID NO: 21729 - DNA, 588 bp, Glycine max
  unsure at all n locations
  Clone ID: jC-gmro02800031f05d1
gctcattacaaatttgactgattaagctccagaataataagtacagaattgctgtataaaataaatgaataaattatactacaaaaatcttgctaccaatgaactagtgctatatggagccttccgtgagtaaatcttgctaatacggttttgatgcaattttcttcaaaaaaaaaacttggtaggaaaaaaaagaagtttgaaagcttaggtactgctttaatttcttgcttatatttgcggcataaacctatctctatctgccttcattgttcattagctgggaaaacacttggctagtacttacatctgaagaacagttataatgatccctctctgtccttctgttggtagaaggatttccaggaataattgcatttgtcacactcacaaattcttcactagcatgtctattggcatgtggctccctttgttgaccactttcttggagctgaagtgcatattccaaattccacaacacatcacccattgcaggcctgtcaacaccatattcagccaaacatttctctgcagtctcacaaaatnttttcaaggagtttttgtggatctgtccaacaagatgaggat

SEQ ID NO: 21730 - DNA, 509 bp, Glycine max
  Clone ID: jC-gmro02800031f08d1
actcacttaaatcataaacatccattcattaataatattgccatgcatcacattgagcacttccaaatataatttaacacacttcaagatatcaccgacatgcatatccaagtttattttccatacaaaggaaggatctacataactaagcattcttctcagcaaacttcacaccgattttattatacatataagcacttatccaaaggtcaagcccattattttttagtgcataacttttagagctagctatgctttgagaagatgaccatcaatatctttagtgcatttgtgcaggtattcaatgtggccatatggaggatcaacctcctcacgaagcctgtcgtattcaacggtccatttgataatagtaccgccatgatcattatcatcaatggcttgaaagatgaacttaaagttcttataattatgatcaatgtcaccactgaagagcttgcaggcgattgttttgctctgttcatcaatggattcaatactctccagacatg

SEQ ID NO: 21731 - DNA, 510 bp, Glycine max
  Clone ID: jC-gmro02800031f09d1
gattaaaatctgttttatctcatctccattagatcacttattagagcgaacattgcttaacactaaactatctaccatcctacactacacaactttcttcaagattgggcagcaaggcacacacatacacccacacccacaccttttcatatctacatatatatgtcatagttttaactaaacaagacaagtatcaagccgcagcaacggctgctttccgggccctcttggttggagacctaatggacttgggctgcttgggcttcgcaggcgtcgacactttcttcgtcttcttcggccctaccttcttcgctgcccttttaaccgcctcggttttcttcggagcagcggcggttgcggttttgcttcgttttggacgcgattcctttttctcagcgttggccttcgtcactttggcggtgttctcctttttcgcggcttcggttaacttgtacgaagccttgatcttcacgagtttccctctcgcagcttggttctttagttgcagac

SEQ ID NO: 21732 - DNA, 517 bp, Glycine max
  Clone ID: jC-gmro02800031f11d1
aaaaggtaagagtattatttccatgataatctgatttagaagtactccgcaatataaacagagtataccaaaaaacactcgatctacagctagtaactaaatcctccattctatgatacggataaacagcagaaagaaagaaataaaaggcaaaacataaccctgcattagttggcggcacgttgagttgagcatgcattatttgactatgcagatctttatgacagaggcagctccaatacgatgcagggcaacaactgcatcaccaggcttacaaagggccctttctgttgcggacttaagagcagcttccagaatgacctctgtggattctgcatcggtagcctttgcagatccctcgcccagtataggaatcaagcccctgtatatcaggctgtgccttgctggcgtctcatcactgcaggcccaatcaaatgagtccgtgctcaacactggaaccaccaccgacaatattggaaccgctggcctatacttggcaactaacctggctgtagac

SEQ ID NO: 21733 - DNA, 496 bp, Glycine max
  Clone ID: jC-gmro02800031g02d1
aacagtaataatactctaatctttatacatagcatactcttggggtggtgaaatgaaacattaaaactcttgatttgtactatgcagcaacttcctcacgaaaaaaacctagcggaagaaagatattacagaaatacatgtagtgtaatgtattgcagtggagctagcaaatgctaatttaacaaatacgcttagccgagttgtacaattgttaaacgcacattaacaaaactaattatttggtttaattgaatatcaatttcaggaactgagagtgtacccagtggcagcagagtctgaagaatctccagtaaaatccatcatcatcatgaacggatgaaaatcagcttcgttgatcctgtcccagaattcgtgcgagtccattcccatgccttgattgagattatcctcgttgttaatctgctcttctgttgcagccatctccggctggagagtgagcgactcgtcgaccaaggggaaattgagcttggcccgt

SEQ ID NO: 21734 - DNA, 389 bp, Glycine max
  Clone ID: jC-gmro02800031g07d1
aaaaagtggaaaacactgcatagacggctgtctttatgtattacagaccaagcgaggtgaagtgttaatcgagcagattggtgagaaaatcaatctcttctcttctttttcttctcattcctctcagtcgatttcttcaacataataacaagaatccggacaaaaactgcgaccagatcggttaacaaggtcaaggcatgctttacatagtccagatcgcccaagtgtgccctctcaactatttcttgggtgtctactacaatgtaacctacatactccaatagcccaaagtacaactcatacttacagagagctgtcgagcctccaaagatggaagaagcaaagcgcaaccatagaaggatggacaatccataagaatccaagccacc

SEQ ID NO: 21735 - DNA, 566 bp, Glycine max
  unsure at all n locations
  Clone ID: jC-gmro02800031g10d1
attcaaggtcacttgtaatttttcctattaaatatttttttcttctaccaaaagtatccccacaaattgttaaaattgatttccatgatgattattcttaatcgtgtaccaagattttagacattattcatggggcacggtttgcgtaaagatggcagattacaaataaagcgtgataatttaacatatttacagccacaaatgaaaacctgttcaatgtcctctccctccaaccaaccctctcctgtctcctaacacaacctcaacaaaccaaaaaaatacatacttcaaatcacaaacaacactgctggggccaatatcctatcctttttcacccaaaaatggggtattcgggaaaagaattacaattaagagaaaagttaaaattaaaaaatagacttctttatcaaattttcctttccaaagtaaaaattgacatttctaaagtagtcatctaccgncattggttttcattggttaaatgcaatgacccgtccctcatcaacgtaaggctgagactggcaaacctctctcgagagtactgtcttgatgcttttctccaatct

SEQ ID NO: 21736 - DNA, 343 bp, Glycine max
  Clone ID: jC-gmro02800031g12d1
cttcttggtttccttgagcttttggtcttatggcgccaccagattctccctaaaaaaaaaattgggtaccgtgccggtggtgccgaacaacgagctacagagacacccccgcccctccttgaatcagcagcgacaactgcttttacatagtgggagacctccttgtgcttatagaaaatgggggggggcaacaagttttccttggggaaaaaaaaagaggccccttcttgggggggaaaaaaaaaatgtcccgggctgacaaagttaatgcctatggcagacacagggtttcttaaataaaaaaagacccagacgggggagggggggtttcatgcgagggggg

SEQ ID NO: 21737 - DNA, 564 bp, Glycine max
  unsure at all n locations
  Clone ID: jC-gmro02800031h02d1
gacccgcgaaattattgctaattagctaaatatccattgaacactgggatcaatccaaaataaaaaaaggagaaaaaaacatagccaaaaaaggcattagagacgctactaacaagaaacgcatcatatttaattttaatcaacctcctccatcttgctgccctcagcatcagcctcggcctcctccagtgggggcatttcagcatcagcttcacctgcatcctcgtcaatgctcagtccaagcttcaacattctgtggatcctgtttccaaaagtgttgggctcgtcaaggctgaaaccagaagtgagaagagcagtctcaaacagcaacagaacaaggtccttcacggatttgtcattcttgtctgcatcagcacgcttcctgagctcctccatgattgggttctcagggttgatctccatggtcttcttgcttgacatgtaccctgccatgctgttgtcccttagagcttgggccttcattatcctttccatgtttgcggnccaaccgtattcgccagtcacaagacagcatggtgaatctacaacgcggtcagagaccac

SEQ ID NO: 21738 - DNA, 436 bp, Glycine max
  Clone ID: jC-gmro02800031h05d1
agaacaacaaaacttcattgggtgggccaacatgatcatacattagcaaataattgggaatttttagcatcaagaactatctgcctaactgctgcaactgctgctatagctcccaatgcggagaaagccacaacaattatcacattcaaccagaaaacagggcttcgcttaaatggcttaaatggcaaattgtaaaaaaccattggcaagatgaagtcaagtgggataaagccaaaagctcctataagagagtttatgtctccaaaaaatggaagcatggctgctatagtgggtgaaatagcaatagctaatgaccgagatatcactctagggattacattgcgtttggagaactcggggctttttgggtctccaaatgtttgctctagcacttcatttgttggttgcaaataaaccacaccaaccgcagataatt

SEQ ID NO: 21739 - DNA, 444 bp, Glycine max
  Clone ID: jC-gmro02800031h06d1
aaaagaatggttcttaagattatattgcaacacttgttatgggtcgtgcgagatgtgagtcctatgggctctaggagcgtttgcattctacatggaaggcctcgaggaaatctcctgttgtcggtgccctaattgccaatcaggctgttcttttgctcccaacgcaccctatgctgcactatgctatccagctcttgtgacaaccatgcattactgggagacgcacatgaaggtgaccattacgatttccatgatgattttccatagaccctaacacaaccaccgtcgttggactccctggaggatgcagacaaaggaccttagacccattgctgcttgacaagtacaacccttgaggaccactcatgagcgttccataggctggagtataccctcaacggtaggctttcttgaaaaggaactccaatcgattccaaattcctg

SEQ ID NO: 21740 - DNA, 277 bp, Glycine max
  Clone ID: jC-gmro02800031h07d1
accaaagtctattttcttctgtttttttccttttccttttgttcatccataaaattttgatgataagtgggagagagtcagtacaagtggcagtctattctactctacgcgtatatgtatgtttgtagctatacatatacgtagtataatacaaactctaacgactaactaattagcgattaactttactatatgcaaggaaaggcgcttgaacaaccgcgtcttttcccattcactcgagcgagtcgactcagcgactcactaccaacactgatcc

SEQ ID NO: 21741 - DNA, 501 bp, Glycine max
  Clone ID: jC-gmro02800031h12d1
aatggaagtaactgatatttatgaaaatgcagatgagttgccttacatgtctctactctatgaacatccattcaagtgaggcccttgattttccaacaagatgcttcaaggttaaagctgttctttatttgccagtgtttccttctataaaaaaaagttctgtatgtacaggcaaaatgctggtgacaaatgagttgatgatcgcatggataccttcctccaccttaaggcagtgattcctctctgtaaatgaaacaaacccaattatctattctagggtgaagatcttcgttcgcatcagaggtcatcatcaataaaatcccccaagaaagacaaattcacataggttcagtagctcccacctccatgaaagttgactggacatcttttcatgattaacctggtaggtcaggtccgaccaaatggtccaaattattacagatcaaaccagttagaatggtgagatgcagtgaaaacaggaatcttaacttcatatctact

SEQ ID NO: 21742 - DNA, 312 bp, Glycine max
  Clone ID: jC-gmro02800032a03d1
ggctacaaaagaatggtctaattttattattcactatcttattgggcaattaaagtatggatttgggggttacaaattcaggctctaacctggggcacactgtattcatacatctgtagaaagggccaatacatgcttttacatacaaacacttttcaacaaacaaggaccagtgacttacttcaatgccatgttctacatggaaacgagcgaggagctgtctttgtctcaagcaggctagcggtatccacctttgccaaaacacaaccctttttttttacagaatagacttgccagccacgccacgatgca

SEQ ID NO: 21743 - DNA, 473 bp, Glycine max
  Clone ID: jC-gmro02800032a04d1
gacatgaatatcctcctttttgtttacaatcaaatagtcgaaagtccaaataaattttatagttaggcatgagaaaatagtgcagtgaagtatttattttcttgaaccatgtctatgaactgcatatattacataagaaaactacgcagatttttccactatttttgtatatcccgttgaaaattttgggaacctaaaccattgttgacgaaatcgtgtaaatccatgaattttaagtcggaaacggatcctctttatttttcttccaaaggtgccccatctttgtttcaagacggcatactttgctgatcgcactagtttctttgtgtacctatatacttgatgttgttgggtctgatcattttcttctaagtttggacggtgcaggacctcaactaaactttccaaacgctctctcatgcttctttgaataaaacctttggagctctttacatggtatctaacataggcat

SEQ ID NO: 21744 - DNA, 521 bp, Glycine max
  Clone ID: jC-gmro02800032a06d1
aaaatcaagcaacattttgcaagttatatccatttctttatccattacaaatatttcagtacatcaggattacaacactagtaaaagctgatactatacgtcacttgtatccaaatttagatggtatcaactaatataaagtgaatgccctgatcaagacatactacatacagaaatatacaaataagccaccttacatggaatctggtggatcaaatgatgtgatacacaagaaatttggacgtgatccctatactatacaaataggatgcaacattattcatagacaaattgagctcaatacagcactattaatatctatagggtaattgaaaggtgatttggcaacaagcgatctccatgtcttgttttttgggtcgtagatttgaatgaacagagttcctgccctcttatgttgtctggacctccgtgtttcagtaaaatcaacaacacataaatgtgtcactacatacagctccctgtctaacacaacaaccccatatgacgaatagtaagggagc

SEQ ID NO: 21745 - DNA, 516 bp, Glycine max
  Clone ID: jC-gmro02800032a08d1
acaaaataaatttattgtaaaaatattattataactcaaaacaaacatgcactttcattatcattgcagttcactgttcgccactatgctatcctttattgtcacaagcatacaaatccaaccatttcccacctgatcacacatgggtttacaaacttctagggaaaaatttaaaatatcaaattaaaataacacgcccagtgactttgttttttacagaggggcaaaactctctctctctctctttctctgagcgcgggttccttgtatcatctaccatgttcgctaaagaaaaaaaaaacgattaagaattgaaaattggaagatacagtgtactgtaatacatacaaaaacaacacccttgagattgatttgtatttactacttacctaaacccagcaacaaaataaaatattgaaatctactcttgctgttgttgatgactccgacccatcataagattcataaccccctccaatccaacaagtttgataaatgattggaaagtcaaaggaa

SEQ ID NO: 21746 - DNA, 369 bp, Glycine max
  Clone ID: jC-gmro02800032a09d1
gatgagaaatggagattttaaatgcctcctacaaaaatttccattcatgtgcaaaaaagagatgatctcttcaaatgccttgacaaggtagaaatcttggattagtagtctaatataaagaaacagaatttgtgaaagcatcaaattgagttagtcatggcatgctcatcctctagcaatgatagtcttctcttagaaaccttggacctataacaccacacttcaaatgcctcagttaagtctggatactgcatgtactcattatccagccactcagttaaaacctctgcttgatcccctgaaggcaatgcatgaatgatagacacaaacgtggattctaaggattgccacatttcgccatctaattta

SEQ ID NO: 21747 - DNA, 453 bp, Glycine max
  Clone ID: jC-gmro02800032a10d1
attgcggcataatacgctgaaatacctcaccctctttcttcacacacaaactactaccattactcaaagcccacctgatttctctattttcttccaactttataattgagcaagggcttcaaaggattcgtttcacactcataccttgtttattctacaaaccaaaacacaaagataacgtactaaataagtgataggtgatgctgatttccaattgtccacaacttatatagtagcatcaagtccaagttctatggccttgagtttcaatgatttcaagcaacgaatggcttcatcaagaagctcgattgggtccttgtcctttccaccaggaactatgcattgcaggatgctcagaacatcttgaatcttctcctttctcatctttttattgcctgacaaggaacccattccacctgaccctgtactactactgttgccaccactagagca

SEQ ID NO: 21748 - DNA, 498 bp, Glycine max
  Clone ID: jC-gmro02800032a11d1
acaacatatgattttaacaaaaatttatttattttaatactaatcatttaacaaagggagaaaaagattaaccaatcgccaaagttcaaggcagatctggcttaacaaaacttagcatactaacgaattatttagcatttttacattcacttgctcaaaaaaaccaaacacgctagtaatattatgtttgagtcagcaacggagcaataaattcccgacacataatagtaatagtagctgcaaacgtggcagatgcttaacgaaaaacgacaatatttacatgcaacccacggtcatcttagctaaagacttcagcttcagcggtgcctgcttctggtctccccactgtacagccagtcatagacagtgggagtgttgggaagtggtttgtcaaacatctgagcaccgatggtctttgtggcggagttgctcccaggatggaagtacgctcctcaaacgttgtcagctttatggccgatcccgtgtcgttggagtcgc

SEQ ID NO: 21749 - DNA, 484 bp, Glycine max
  Clone ID: jC-gmro02800032a12d1
aaaaattcaaacctgttctttagctttacaaagagggatggaagtaaagcttgacattatctttcaatgtctacagaaagagatattctttttatttaaaaatgcacgtattctctgctgcacaattcacttcacttgcagctagtaaggggtgatccacataaacacttgttgtgaaaatacgaatacacatcaaacttttgcaatctcccaccctgcggtatctcaccacacaaccgattatagctcacgttgaacccctgcaaaaaatccactgcggtcaaccccacgggaatgctcccggtgatctgattgtgattcagatccaacgatatcaagctcgtggggaactccaccttggataaatcaaacgccaacgagttcctcgaaacgtcaactatctgtgtcgttttgttgcgaccgaaaagcacggaggcgtcgccttcgagtttgttcctggagaagtctatcctttgtgggtcta

SEQ ID NO: 21750 - DNA, 378 bp, Glycine max
  Clone ID: jC-gmro02800032b05d1
ggaaaaaatggaaaattaatttaaaggctttgccatttttttttatttttacatacaactttaacgatttaaactgtttttttttttgaccctgcaacttttttcaggatgaattcgtttttggatgaaattaaaacttcttgataaaatcggaaatgggagttttgatttcctcgggggctttttgattattgaagggagccactcctttttgcacaatcacttgttctaagtttggcacattttgcttgaaccctccaccggggatataccccttcaagtttagcgagggttataccgagtccaactcacctgtaatgaattttacgggccccttgatttgcactcctgtccatggagctgtcagctcccaaacta

SEQ ID NO: 21751 - DNA, 531 bp, Glycine max
  Clone ID: jC-gmro02800032b06d1
acacatataatagccacatgcattccatttatttaatatagtatatagtaattgactattgcatgaagcagaattgagaaaatcatttatccaacctaggccagagcaagatgtacggtatcgcgattctattatgttcccacctaactattgttgtaccagaattgcttctgaaggtagtcgattacgtttttgcccacttgaaaagctttggcaagaacttcatcagagataggaggtttagatccaaacacagcatttgcaatggtaataactccagggttttggctactaagaccagcaatggccaaagcatttccataacctatgttttgctggaagtgaatgagcccaatagggaacacaaacacatcacccttgttcagcactttggtgaataaacggttatcgttttgattggacgcaacaaagccaacatagagggtaccttccaagactacaagaatctctgtccctcgagggtgagtgtgtggagggttcaaaccctttggtgcataactatgcgtgcca

SEQ ID NO: 21752 - DNA, 393 bp, Glycine max
  Clone ID: jC-gmro02800032b07d1
agagacaaaagtgtaggtttattagaaaaccatctcaaaaccgggcatcacttcaagttcagagatttacaatacccattagcaggccaaatatatatgacatttttggaacaaccccattttcaagcattgatacaatacagagtaaagaaaagggaaaagaaaaaagaaaaaattaaggggattgatcatatgatcatgatcatgtggtggagtctaaaatgaccttggctttgccacaatggtggaatgcttgagtatgtgcaagctaaattgccctcctttctcactagtgtcaatctgtgactggccagggggaggcaagagctcaaagttttggaccaaacgtcccaaagtgatgccaagaattggcaatgcaagattgattccagg

SEQ ID NO: 21753 - DNA, 426 bp, Glycine max
  Clone ID: jC-gmro02800032b10d1
gactcaaaagatacatttactacaacaaactcaattggagagtaagagagacatcatataatatgcaaaactttatggaaaaggttcatatcctcagccaaataacataaatcaaaagtaggactatgtccctgtgttccttcggccaacacgagcaacaaaaccagccttgattggagcaactgatcttcctgatccacacttctcacaccggagaaagaagagacgattctcctttgaaagtatagtatccggactcttgcacccaaggcaaataacatattcattgacatatcgtcgcagaattccttcaaagttctttggtgcaaaccttccctttacaaccaatctctgctgtccatcaagggagccacttgtacccaattcagcatgcaagatggccatgacatggtctggctgccgatg

SEQ ID NO: 21754 - DNA, 441 bp, Glycine max
  Clone ID: jC-gmro02800032b11d1
aagttgaactttcatctgaatctgacatgacaccagaaaatattggcccgtcttgaagttctgtgacaggaattttaaattatccccagacagcacaaattatttaagctacagctacatagaactctgaatttcaagaaaagattattatccatattgtacaaagaaaaacaacaaacacccccaaaaagctgcaactgcaaaaggtgaattcagcgtctcccagatgcaactgattcggtattgaagagatacttcactcgtgacagaaccgaatcatgtgccggatcataaggatgatctttagaagggatttcaagtattgcaggaacgggcttgttataactatcaaccaaaaaccttatcatatttgcaacatattggctaatcagcacaattgcaacatcctcccttgttgaaattctttgaatgcatcctcaa

SEQ ID NO: 21755 - DNA, 290 bp, Glycine max
  Clone ID: jC-gmro02800032b12d1
gtaaaaacccccaaatttttgtgttttttttccccccccaacgtgggtctttgttaaccaaatgtttttttttccgcgcggtggttttttaacccgccccccccaagaaaccccggggggtaatcctcaggggtcccccccggggcggggggggtttttggaccttaaaggggggggaggtttttttttttaaaaggagcccgtggttttttaaacccccctcccaagggaaaaaaaatcctcccacggggcttttccttttttttggacaccccaggggggggccaaaa

SEQ ID NO: 21756 - DNA, 286 bp, Glycine max
  Clone ID: jC-gmro02800032c02d1
gacagttcagtagataatatccattcaactaaatttgagaaaaaacaaaaagcatggcgatatataatatgtccttcaatagaagatgagataacaaagggtagcccagcatatacttactgggtgctagggtgcttacgacgaggcacaatgatccgataacatcaaaactgctgctgcttctgctaactcaagcctccaccctttcctgctcggggataagggccttccctgttggctctgccaatcaatcaaagggctctgggaagggcgacacggagaaccg

SEQ ID NO: 21757 - DNA, 409 bp, Glycine max
  Clone ID: jC-gmro02800032c03d1
gacgatagagattagaatcataaataatctcaaatcaaccaatacattatatatttcagagacaaatatttcacaagcggattgtacattactatatttgaaaccagtatcctggaacattggaagctcctttaattgaataatgcaagggaaaaattagtatcaatctcatgatatacgcccctatttcccaagcaaacgatgactacgttgattagcaccattcacacggacggtcaacttctccatatcattgtcaaaaccgtccaaggcttggttttgcctcccgatttcagatcccatgtcaatggccatgcctttcagttctcccaagagatcacttaaatctgacagtgcatcatcttgcttccctttttcaacctcaactttttcgagcgcatttgatggc

SEQ ID NO: 21758 - DNA, 346 bp, Glycine max
  Clone ID: jC-gmro02800032c05d1
acatagatgttactgggggcattcttttttaagaataggaaggaaaacatcgacggaacatgtttctttaaaacggaaccgcaaatcctgttaacaagagcatttatggacttttaacccttaatgaccaaccaaatttctgaaaaagaaaaaataatgcctccaccaacgcgcagaataaggcttccttcttgcttccatttaaaaccctggctaataaattcaaccgatgaatcgcctgaccctattttctgcaaccatcctacatgtttaaaaccaatgttgggattaaacgcctgtgggtcctatcaattggaactaccaacttggactatattaacctcaa

SEQ ID NO: 21759 - DNA, 438 bp, Glycine max
  Clone ID: jC-gmro02800032c06d1
cacattattactagttcataaacgaatatactaagcataaacaaatccaattccaaaatttgagaaacttggaaaacaacaacataacataaacctatcaacaccacgcgcaactcttgattaccgttacattaatcggaactcaacccataaaaatgaagcaatatactctccattttctaatatagggacacaataacaataataataatggtaaatgtctccctcaatttcacaccatctctgcaaaaggagagtgaaatttcaagggaccaaaattacagggcagaaggggcaggtgctgatgcaataatggcctctgacacgtcagaaacagggccaggggcagctcctgagctcacaagttcaaccatggcacgacgagggttggtcttgtgcttatacacagttctggcaaatataccccctctccagcag

SEQ ID NO: 21760 - DNA, 533 bp, Glycine max
  Clone ID: jC-gmro02800032c08d1
gcacaataatagtagtctataatcacattgccactgagcagtggtaagattaagcatattctcgatacacagcatttgcatgagcatcgatgtcaaagtaaataatttacccactacaataaatccaacaacgacacatgctctcattcacttatttaatcacttgagatgacaatgcaccagtatttcttcccaaacctgattttcccaactagatacgatcttattttatgccctccaaggcaaagaaactagaggagaccaatgtccatcacactgccacatggctgcccgaaagatgaattccaaggccagccagagtataaagtctgtcataacatgccagccaggctaaaagcattatgtaacgtttctcaagcatacataaattttgattttcgacaataactgtagtttgacataaaacaagtatatcaccgattttgtgaaggcattctgtcggattcgtgccttaatcgaaagctgctggatctgatacttgggtctgacacactggcagtctggtggtatgc

SEQ ID NO: 21761 - DNA, 378 bp, Glycine max
  Clone ID: jC-gmro02800032c09d1
aaccataacaagctgaaatatccatattcataaattttacacaaagggttgtcatcatggccccttacaacaacaaagtactacatctaactattctttaaaaatctaacacgatgattcaaaggacgccctgttgtcagcaggagaacttagattctctcttgcacaacaaccaagccccctcaaccaaaacaattcccacctaaacacaaactctaaaacatgttagacaattaattagcttctatataacataatcagaccatgaagtatggtccatggtaaaactaggcatcttatccaatttaatagggttatgcttccctccaaccaacctagcagggttcccaacagcagtagtccttggtggcacttcct

SEQ ID NO: 21762 - DNA, 454 bp, Glycine max
  Clone ID: jC-gmro02800032c11d1
aattatgttagtctattaaatattggccgagattgattacagttgaaaaatgaactgcagatctgatccgtaaaaaccactagctagctcgctgtcattggtaggacgaaaaccgaaaaacaaggggaccttccaacaattcatgtatcaagttcgaattataatttacataattattgcaagcggtggataatagataaagtagagtttaaaatgcaagaagccaagaggctcatgacatgaaacggtgaacagagatgaaacttgaaggaacacacaagtgaagttgaagctcaagggtaggtttcagaggctgggacaggggcataggaaccaatgaagacgtctccataaatcaagccagccaaacctcctccaatcaatgggccaacccagtagatccagttagcagccaagtctccactgaccacagctgggccgaatgagcgagctg

SEQ ID NO: 21763 - DNA, 489 bp, Glycine max
  Clone ID: jC-gmro02800032d03d1
gaagcaaaattaaaattccatagatatccttctgaaaacaatacacctcacattgcatataatttctttcctaatgttgctgaaataagacaataattatacaggcattacagcttaaacgtgaaaataaatagtacaaatgcttatatagaagtagctttaatcaagccatcactctcacctgtcaaatcaccatcgtcatcatcttcgccaccacctttgttgctttcagtatccaactgtttgggctgggccggagcactcccaagcccagtcacagactgctggtaaagaatcccaccaacaatggtaaaaaacaagcaaaccaaaccaatggggctagcatgcttatcccaaataagtacattgatcgccacagtgagaaacttgttcaccacgccggtgacggtgaacgcggtggcggaaacggcccttctggccgcgaacccgaagaaactaatgagcaagccgaagaggcaagacagggag

SEQ ID NO: 21764 - DNA, 323 bp, Glycine max
  Clone ID: jC-gmro02800032d04d1
cccatataaagcatgctgattattcaatgcagtaaagcaaatgagacaggttttcatacaggaactgattattattacatgaaaataacctccttattaagatgctgagtgcgctatggatgatgacggtaccacataatcaatcaccatcacactctcgagaggctccttgaccttctcattcttatgatagacccataacttcttaactgtctctatgtctatgactgcatgaacagcgtggaggccagcaacgggcaccgctgaagctctagcgggagagaaatatcccccgcaagtgaactgaatggcctgtttgaact

SEQ ID NO: 21765 - DNA, 428 bp, Glycine max
  Clone ID: jC-gmro02800032d05d1
agaagttggaacatcaacacaatagataatgagttgtccacatagtctcatacaagaataacagtttactatagagggatcaaaacacatagcatacttcctagacgtggacagatgcacacaactttcaagtcacactgttacagaccatttcagggttagtagctatgttacatataaaacacagttacagacttcataacctaatacaattacatgagtgtctgtgattctacattcattactcataggcttccacatcttcacacaatataacggggccaacactggttatgctcaagaggcagagaccggtggctgaaattcctcctcagatcggttcaaggaaaccagttctggtgcattggcagcacagaagttgttctctatgttgtcagccacttttggggttgatgaggaaggataag

SEQ ID NO: 21766 - DNA, 430 bp, Glycine max
  Clone ID: jC-gmro02800032d06d1
aagactaacatgaaagatataatataaacaaatcaaataattcagttcacggggaacaaagcatcattcttgtttcccaatgcatgcccggtccactgctacagttactggtgccaacgcacaatgtttgatccacaaagctaaaaaatagcactcttccttccattgatgttgaatcaaaccatattaaagattcccagagagggaaaactaaaaaacttgcttctatagatgctagctacatgctatttacagtatgaaatgaatctcataacccaaagctgaaaaaaaagaaagtattactattctttgcaaaattgccatcaccattcaccaattaatcatccataacccaagtcctgctatgtctccgcgagcttctattgatgattgaactcacgtgactacggcttctacttacagacccatg

SEQ ID NO: 21767 - DNA, 534 bp, Glycine max
  Clone ID: jC-gmro02800032d08d1
accatgcaacaaactatccatgtcaacatttcttaatgaacaaaacacggccatccaaacactcaaatgctaagagtgaatctgcaagtgaaacaaattatacaagtagtatacactagcatctatggttgatatgatcaaacattgaatttaaccatgtggcagtgcaaaactaaattgtcaaatagttattacaagttcacaaaattctttgatctatgttgcttcttcacttaaaatcccaaattcccaatcgaaggatatttaacctttttcttattcatgacatggaatgctctcaaccaaaaccagaaggcaaaaaaaatcaaaagttctagataagctctttagctgcagcaacaacagcttccttagtgataccaaattctttgtatattcttccagctggagcactagctccaaaacgatcaatgcctattgcttttccctttgctccaacaattttcttccacccaaatggtgatcctgcctcaatgctaactctgggctgaacagcagcagggaatacactct

SEQ ID NO: 21768 - DNA, 503 bp, Glycine max
  Clone ID: jC-gmro02800032d09d1
atcacagtaatgaaaaatacaaacttcattaaacttcaaagcaaaatgcagattggtcagccgcgccgtatgattaagccaaactatctactaattcttctcaattatcaacccaaaatttgtctcacaaaacttttcacatacatagtaaacagaaaaaaaaatgtggattgagacaagggaatttgatgcctgaaaatgagtcaccaactgaacttgtattgccaatgtaacttgaaagttgaatgcttgccattactcagttattctgttctccgtcaccccttcatcgttttcttgcttgtcaagttggctgaagttacctttctgcttgaacaactgagtatgatggtgcctgcaataaagacgatgttcatgggcaacataatttgatgggctaattacacatcctccatgagtgcacctgaaacaagccttatggtaagatgttccatcaacagctaccttttcaattgggtaaactgttttcttgcaagcaacac

SEQ ID NO: 21769 - DNA, 502 bp, Glycine max
  Clone ID: jC-gmro02800032d10d1
aaatcttaaaacaactcaaactaatcaactttcattcttccaagcacagaatactcaatggatcacaaacgtcaaggaactagtggcattatgaagcacaattaatcaactgtataatatgcaaagaaacaagatgtcaactatatttcaaaacgaaaactctaaccattttcaaaacgaaaaatcacattctaaggctccactgtagtcacctgttgccattccccatctactgcttccttccacaatgtcacattgttgttcccatcagccacagccagtatgtttcctgtcaatgaccatgagaccctccaaacaggggtcttgaaatcattcaaaaccttgccttcccactgatctccctctttcgccacggtccatatgatcactttaccatcctgcgatgcactagcaatggtagatttaggaagccctaaattgggtgcccaagcaacatctcggacccatccgtgtgcatctgaagagcagggaagcagtccat

SEQ ID NO: 21770 - DNA, 388 bp, Glycine max
  Clone ID: jC-gmro02800032d11d1
gcggaacgggcaaataaacaataactttgccggaaacctgggttttcttcgggtcttttctcagggtctttccccattgggggttttactaatccccaacctcctttttaccaaaaaaaccttttttttttgcttcaatttattcaaacccatttgctagaaggggaaaaaaaataaaatcccgcccatttaagcccccttcgaattcactggtaaaaagggagggtaaatacctaaaagaaaacaacggaaagccaaagaccccaaaagttttagtagggttagcccttgacaaacattcccttttgggccccttcactctcacccccagcagagtatcttccaagtggggcccaggggttgggttttcccgcaccaaaagggactt

SEQ ID NO: 21771 - DNA, 518 bp, Glycine max
  Clone ID: jC-gmro02800032d12d1
ggcgtaaaaagaatataaaactagcacagattgcgaaatccattcaataaccaagtaccttctgaatatccaaacacaggtttagtaaaacagtaaaataaaagattaatcttccaaatgaaatatcagtacagcagtgtcaaaacaactatttaaattgtagccaaaattaggaacaaaactaaaagctcagcgtttcccgcctccaccgccaagtttgggacctttgggcatagcacccttagaaacattgcctttccctcctgctttttgcgacttggaagcaacttctgctttcttagccttcttctcatcctttgttttcttgatcctctccttaatttcacgaagagcagcttccctagctgcatctcgaacttctggcttctcagctctctttttctggattacttccaaggtcgcaccaacaatggacctagagtaaggctttttggcagcacgtctcctcttcctcacagcttcttgagcaatgtcctttttgtgttgctttctgtaca

SEQ ID NO: 21772 - DNA, 497 bp, Glycine max
  Clone ID: jC-gmro02800032e02d1
aatcaaaacagtctaggacagtataaatgcaattttaccgccattgcaaaacatcgaaagtctgctataaaatgcagaatacacaacatatacgaacttgtgttcacaaaaaattatttaacaacgcagactcaatcgttgttccttttgccgggatctcaaaacagcaaaaaggatgacaactaatgtcaattgcctcattgcttcataagtttgggctcttctccaaatttgatatagctatgtacaacaatctaacaggttaaacactttcgaacagaactcggcgctccaatagttctgataaaacacccctcattttgtcaacagaaacaggtttcaatataaggccatccataccaaccctcatacagttctcttttgttacctttttggtgtttccagtaagagcaactatcagtggtctatcttgatgcttcgtaaacttctcatgtatacggactgcgagttcataaccatctaaccctgtacaaaca

SEQ ID NO: 21773 - DNA, 472 bp, Glycine max
  Clone ID: jC-gmro02800032e03d1
caaggagaaaacaatattttttcattaatcagaggagagaaaagatgactaggcttatcgagccccaactaatttattttcaccgtccacaaaactcccaatcagattcgaatcaactgccttttatatacagtgttgctttcacatggctatacaaaagagaatgctcatgcttcatatggatgtatacggggggcatcactctgttggctgaaatgatcttgagaatcaatgcgccggccatggtttcaagggatagttaaatccccatattttggctagcatatccaccttatcgatagcttcaccaattcctggacaaagtagggatacaacattggctccatagcctggggtaatcaatgtaatgtaaccttgcatcgccgccctaagcagactgataagtgacctgatctgccgtacttgtgtcgcacttgacatttgcctgacgggtatcctctctactaggggg

SEQ ID NO: 21774 - DNA, 135 bp, Glycine max
  Clone ID: jC-gmro02800032e04d1
gaagaggcttcccaacctttgttgaattttattaatggatccacacactggacaacacacgaaatttgaacacaatgtccgtaaacattcaatgttcattaatgaaatgagctatgcgtttaatttaactctttg

SEQ ID NO: 21775 - DNA, 519 bp, Glycine max
  Clone ID: jC-gmro02800032e05d1
aaagaagcaacatttattatgataaatatcttagtcccatttgacaaaagcaaagtaaacagtagaaatacatgctctactccagaaaaaaaaattctggaagactttgagcctgtgaagactctgagtagaagtatcacaaattaacgtgtgtttgattctactaattgatgtgaaatcaggtatctatcactaacatggacatagtacccttgtaaaggaaaatctacagaatcaggccatgagttctcaggaaaatatcctagacgatatgttagccacaaaatggttgttggaaagagccagaaagtaggtggtttggcaattcaatatacaattttcttggagttcttcctcgtcacgtggttcctcaatcatgctggtaaaagcatatcagaccttgaaaagcacagaggagggcccatataaagccaatttacattaacatgtcaaccagcttcacagatacttattctcaactctcaaccattaaaagacttcaaatagtagaaaataata

SEQ ID NO: 21776 - DNA, 522 bp, Glycine max
  Clone ID: jC-gmro02800032e06d1
ataagaaataattgcagtttttttcattaaaaaatgaatctaagtacatcttttgctatgggagctaaaaaaaaatcataattatatacacatgatagaattgccttaatatgtcaaattaattggattccacgagaacttaaaggccaggccttccagaagctaccaaccaagaaatatgacaagataatggtacttactatttcaaaattgcaggcctaatggatcccaactccctttcattcctcccaccaacaaatgtcataccatgtgccctgtcacaacactaatattgagttgagcataatatcccacatcaacattgctttttacacctctcatatcattgccaccttagaaaagagatgcaagcaaaactccagcatctggctgccaaaactttttttcttcaatctttctgagcagcctgaattgttgttgaacatgaagcagagcagcatgggcctccagaacatatgattaggagtgcaatctgcagaaattccttcatcggaggggggg

SEQ ID NO: 21777 - DNA, 482 bp, Glycine max
  Clone ID: jC-gmro02800032e09d1
aaacataaatatctaaactgggcttttactccacaaatttaaacaaatcatgagttacattacatagtggtccaatgttacagtgtaggaagctaacattcaaacaacctttcaaataacaaggtaaaagccctacaccacaaaaataattatggtaatggcctatctatgtgctgaacccgagaatgtcagcataagttgtgatcaacgaaaataaaagcatctgcttacaacatttttaaggttacaacaatatttttctccgaaatactttgtttcctaaaggtgcaggctactatccttgcttggccaaaacagtgttagtggcagaaaagttagcaccagcgtattctgcagtggcacactcttcagactttcttgtcgaggttgtatggtgctgcactcatcaccctttctttgcgtttttctaaaaatcgagccaaggattgctttcgggcctgaggtacagctgatgtcaacat

SEQ ID NO: 21778 - DNA, 477 bp, Glycine max
  Clone ID: jC-gmro02800032e10d1
gaaatcataaaattggaattccaagtgacagctttcccctgccactcaaataaatcatattctcaaatgtaaaatttccatcatgatgaaatttaaaaacggtttttgggacaatatcccatctagtaaatttattaaacaaaatttgcggcagcaattagtctaagactcttggaactcaatggtttttttcatcgccatctaaaaacaaataatagtactgactcagcattagaacttaagccccaccagagccgtacttcttgccgaacacaagaacctgcaacttgtcataaccagcaagcacaccagcaccggcaacggcacggaggatgttggcaccggcacccttgaacaaggacttggcaccctcattcttgaagatctgtgtgaatgcatccaaggagctcttgtacttgacagcttcaccagaggtcatcatcattcttcttctaacagtgtctattgggtatgatg

SEQ ID NO: 21779 - DNA, 417 bp, Glycine max
  Clone ID: jC-gmro02800032e11d1
cggaaaaccgaattatcatttattaactgtaacttgctttggaacaattcaagttcactaacaacatccatgaaatccaatcattaaaaattggaaaaccaaaccaaaccaaaccaaaccaaacttatttccaacccccctcatcaaacagaaaaacaatccaaactttcaaaactcacaaactcaagaacaacttgaaatttctactaacaaaaacaagaccaattggtcaaaaaccatgaatcttgatctggtccttcctgacaaggccagcctgaacgaggaagggggaaacgttcttaccctggccgccttggagttggatgatcttgccaagctccttgtcctgcaccacggttccgttgcagcagaactccttcttgaggtccttgaggatcttctcgtagctgaactcct

SEQ ID NO: 21780 - DNA, 566 bp, Glycine max
  Clone ID: jC-gmro02800032e12d1
agacaaacgaaaaagattatttccctcattcatttattacgagtaacatcatacattccaagatgtgcatatcatgaaccatgattgccatcgatctgaaatagttcaaactaacaaccatcttcgtcaattttactttgtcaatctcatggctaaaatcgattaaagataacccttttccttgcagcattcaattgcatcctgaaacatgtcctccaagctatacttgaactcaaaaccagcatcctcaagtttcttggaggttaaatgtggttgcttgacacctttaattcccttcagctcgtctactgttggtatttgatattctggatatttggctgaaagaatttcacccatctcttcaatgggtacaatgaatggtgagcagttatacctcccttttggattaggatgctcaagcaggaagatatgtgctctagcgacatcatccacatgtaccatatggtaacgaatgacaccaatttcttccttttgcccacaccataagcagagctttttcatggagtcaggaagctggggacaacaaaacgaccaacaatgaaagg

SEQ ID NO: 21781 - DNA, 530 bp, Glycine max
  unsure at all n locations
  Clone ID: jC-gmro02800032f02d1
ccggcaagaatacttttcattcatttcaggcaccactaaaatattacaaaaccttagcccaccaaaatggggaaatcaagatgacaccatatgttgggtagaaacatgatcaagagatacatagatacgactgtaaagaaatgccaccacctttcccacagcgtattctacaacctttctcccaccaaaataaccacccaaaatgaagagtacagaaagttgttaaagaactcctaataagttagtaatcgccattgccaacacctactgacactgcacgacctctactgatgcggtaatgatgccacatacacacccacatctccctttagtgattagcattataaaccgcacaaaatgaataggcttgaaacaccaaggtaaaaataaatttaaagaccataaacttaaaaagaagacaaacaagggagaaaaatcaccctaggtgtatgtctgcacctaatacccaagacagtatataatgctatcaggtngaaaatcagtcccaagcactggttaccccaggaccg

SEQ ID NO: 21782 - DNA, 368 bp, Glycine max
  Clone ID: jC-gmro02800032f03d1
gtgtgtggtttttttttgtgttcttgttcgcatttttacttgcccaatattgaaccgggctacttgaccgcattctgccaaaattgggggggcttggcttgtacaaacaatactgggggcgatcccagaatgccctttaaacacgcctcctattgaagggcccacgcattgctagggcgtatcccttgtgagattttgggccctctgatggcgctccctgctttggggatctccttctgggcaggtggggcctgtgaccgctcccccatgggggcctatctaaaggaccaccccttactaataccttaggaacaacattgtcgaaccctccgggaaacttgtgaccatgtagacagacggctgtagcc

SEQ ID NO: 21783 - DNA, 465 bp, Glycine max
  unsure at all n locations
  Clone ID: jC-gmro02800032f04d1
agcatgataaacacaaatgtttgtcacggaggttaaaggttttacaatgtctataaacagttactaaagagcagtgaagcaccacctgaaacaattattaaacaaggggccaaaatgcctgctgaactcatgagctctagttataatcacattcacacctgaaaagctaggataaacaagatgggataatacaagatagtagaacaaaaaaatctaaagacaaaaaattgaatgccgatatctacttttcattacgggattgcaaggtgaagcacatacacttatctttcatgggttcaccctcacttccatactctttaaatctgtactcttcctgcttaaatgaagaaggcacttttgcctcactgtagcattggttacacaaactaaaatgagattntatctccttaaaccgagaaccaataattgggtagcggcaaacagagcacaccacgtcgccatgcc

SEQ ID NO: 21784 - DNA, 577 bp, Glycine max
  Clone ID: jC-gmro02800032f07d1
cctataaagtcactcaaacaccgtcatcacggcttcgaaacggaggcggcgccgtcgttgcctgcgatggcggactgcaccgtcagtacggacatgctcggagacgacggcccttcgccggcggggttggctgcggtcggaaaatgggtggctccggcggcggcgttgatcaaggggttaacgttaacgttcctggtgggacacgtggcagtggagattgcagtggcaagtgaaattggcatgaggcaaagaccttttccttgaagatactgcatagccgaacccatgtcttcttccattagtttcgcgacctggtgctccgtcatcgttaggctatcgtttgaggttgttgccgctgtcgtttggttggtgttggtgttggtggttgaagcctgagccccaccgccgttactcttgccgttggcttgaatgcagtctccgcctccctcagaggacatatcagcaacaaggggagcgacagcagcagcaccgcccaatctgctcatgctcagaaaccttgactggagctgcaggaacttacgtaatcgatgatctcatctagcatggatgccttgtc

SEQ ID NO: 21785 - DNA, 467 bp, Glycine max
  Clone ID: jC-gmro02800032f08d1
aaccttagaaagaagactctgaagcttttctattaaagttcaatagaatacaatcctaaactttgagggactagaattgtactattcttttattcctcataaggttataactaacaacacaaacaatcatggaaaagggaacacagacatgaagggaagggagtgatcacaaattacctacctactcatctgcagaaactgatcagagagaaaggaattctagtcagctgcaaattgagtaatttggacagcaaaagttggtaacttctcaaaggaaggccaactttgttttattacattctacagcaagaagaactacatagatgagcaatagatagccatagagaccccaatggagtccattgccttttcgtgacttgccggtttgccaggctgtagccaaagcctctcctcctttggagaatgcatatctgcttctgccactcaagagagaatgttagaacaca

SEQ ID NO: 21786 - DNA, 389 bp, Glycine max
  Clone ID: jC-gmro02800032f09d1
gggacaaaattctgataaaatttccattgcatcaaaacggtaacattgcataaccaaaaaataaattgtgagtaaaaggagaaaaggaaaaaaaaaaaaccgtttaagttttgatgagatgaccttagacctatgaatgaagtagtagtagtcatggaacaccccaatttttcatccccccctagcaagacatccattgaagggagtgattaacttcacaacaatcttaagcttgaggcttctcaaacttgagtggcttcacaacttcccaggtgaaggcagggccatcccttccaaagtgtccataagcagctgtcttgaggaacctatggccacccctcttaaggtccaagttaatggtgatcattccaggtctgaagccgaaattc

SEQ ID NO: 21787 - DNA, 482 bp, Glycine max
  Clone ID: jC-gmro02800032g03d1
atattaagattattactaagtagtaatgaaaacacagattaggatgtaagcaataacaagtttgtaacaaagtacaaaatcaaattaagtagtgagaataggggggaggtagtcagctttgccaccaagaatgcgagccttggtgtcgggaaagaattcaaatcctggcagctcggtgacatctccttcactggcaaccccgatggggtagcggagaaggtgaccgggaaggtcatgctcaagtgactcgttagaatacagatcccaatatttgtcagcaacttggttcaccttgttaatgcattcatcactttctggctggaggaaggagtcatgaagcatgccaaggtgctcataccacaatgacatgcggaaaccgtgaatctgaccacgtgctggctggctggtagccaaatgatagggctgataagcacccatggcaatctgagagtccctagcaccatccattgacctttggttga

SEQ ID NO: 21788 - DNA, 436 bp, Glycine max
  Clone ID: jC-gmro02800032g04d1
cacatcaagaatttgagagattgcgtccattagctccacccattgtcctattttcacagttacaatttacaaacgaacaaagcctcagcaactaactacactacactacactacacgattgtacacaacaattcagcatttcagctaagtgtaacacataagagaagaatctagtaaacacacaaaaccgttactcagtccaactttttgtagaaacaacacttccctattccatgcaagccctataagcctttatagtcaaacactaatttcagtgaatacggccttcactttgggaggcctacctctaggcctcccattactagtgacaggcttcgccttagaggcctgcgatacttcaccaaggcctccagtgggccaggccatttttctgggccggcctcgaggcctaccactacccaccaccgaagcctta

SEQ ID NO: 21789 - DNA, 435 bp, Glycine max
  Clone ID: jC-gmro02800032g05d1
ccaatgaccaaccaaccatatacattgctaaaaacgaatcaatacagaaagattctgtactcaatctcccttcccttgggcacaaacgattagcaaacaaatacaaacaaaactaatcacaccgaataccatctcacaccccaaaaaagttaaaaacttcaaaagaaaccttggtgatctttcagaaaaaccctttccttatttatgctttccttgtggtactgggttttttcacgctactgaatttggatccaatgatcctgtaacatagccttctcctgttagcatgttgcctggatcctccattccccatttgatataatctggggactcacaggccttgtattcatcaaccaatgtctcaattatgtccctcgattcatcaaattctgagaggccattatcagcaaacataggaaacttcctgtaggcgtc

SEQ ID NO: 21790 - DNA, 471 bp, Glycine max
  Clone ID: jC-gmro02800032g06d1
gcacaaatctcgtttttatacaaaacagtctcattggacatgggaacattttaagttctttcaaacaaactgaggcaggaaaaattggtcctctacaaagaattgcgttgaagggagttctcttattagaagggaagcacacagaaataaagcacaacaaaaaccaaacctcccgggccacattgcaatactcataacaaaagaagggccatgttcatagaccttggtgttcttgcttctcaccagcagcatccaaagccaataatctaaatagtctctaaatgttctctgaacaccttcaacatattagaaaaagtgacaatgccaactaagctacaatcatcctcaataacccacaagtagttcactctatgagcaatggcctggatcatcacagcaacaagggagctcttgggatgacacactatagcctcagccttcctcaccatccgagccgagtagctagatgac

SEQ ID NO: 21791 - DNA, 319 bp, Glycine max
  Clone ID: jC-gmro02800032g08d1
gggttgggttttgtttttttattttcattttttgtttgatgaaatgaacctttttcatactatgggagaattaacaagaggcgcagggcctcgtgacctgaacaacgataagggggccccacatacacacggggggagaaaaggcggagacccattaaacggtaggaaaaaaccaacagggggcccctcccgcccaaaacaaaaaaaaggcggggggggcgccaaaaaaaaaacaccagcggaaaacggaagggaatgccctccgcgaaggggggggggccaagaaccaacaaaaacaccctctttaggaaacaaaagg

SEQ ID NO: 21792 - DNA, 446 bp, Glycine max
  Clone ID: jC-gmro02800032g09d1
gaggaatcaaaactagaattttattattccataaaaatcaaaacctaaaactcaaagttgaacaaattcctaaagagggttctcgggctagcgagaagagaaacaagcaaagaaatacatattactgataatagtggcattcattcaccacaaaaggcatcatgttcaattccccaagagtttttttattcgattaatcgaatcagtgggtaaaaacttgaggttgagggatttgttgaaccaagccttccagctcccaatccccctgctgctgcgcgaaatcccacttgcatctccatctacatccgccacaccctctggcttcttgcacagcatgaaatttcgtaccccatgcgatccaattctatcccaaggacttagagcatcggatccaagatgggggcagtaaagcgcgaaaccggtggtgttgttcccaggacgggaag

SEQ ID NO: 21793 - DNA, 475 bp, Glycine max
  Clone ID: jC-gmro02800032g10d1
ataagagaataaaaatcttttatttatgtcacagtcgtacatatatgatagtaagtaacaacatagggctaacacaaaaagacacacattaaaagggttacattatgggaacacccatgatttattaacccataatatagtaccaccagaccagacctgccaaagcataaaaatatctaaagacctaaacgattacatgggaagaaaaatgcattaactgccttttgagtcaagggactttcacatgtccccttttaatgacacaataaaagcccttgatacacgagtttcccctcttgtcattttcactggtaccaaattgaaacctcttgctgtttgtgaagaggatccattcctactcctccttgtatatcctccttgaatcaaaggatgacaaatcacaaggggaattaaacatcaaatggatattattattgttgctatggttggtatcaaaaggggtatgagtgttcat

SEQ ID NO: 21794 - DNA, 490 bp, Glycine max
  Clone ID: jC-gmro02800032g12d1
cgacaaaaaaacgacattttatttatcatgcattagacaataacagcagcaaaggccctatcattctctacactcaaactcacaagttttcacaaattcaataatcctaaagggatatatatcatatatgaaatttattttcttcttttcacaaccagaaagagaactcagtcccccaacagggaccatgtcatgtcatcattggtctgatatagatttactcccccattcgaatgatgcatctgatggactcccctttcagcatgtaatcaaaagccttgttaatctctgagaatggaactgtgtgagtgatgaatttctccagttccaattccccattcatgtacttctccacaacagaaggaagatcagtgcggggtttgtagtttccgtagaaggtaccctttagagttctctcgttcaagaaattcactggatgagttttgaatgcatcatctttgtttggcactccaacatgtacagcaacacc

SEQ ID NO: 21795 - DNA, 317 bp, Glycine max
  Clone ID: jC-gmro02800032h02d1
gcagagcacacatgaaatatatagcatacactcctaagtttttttacaacaaagtattgttctagtatacgacacaaaccgcaaagtcaaattctaaacaaaattagtatacatcatagtactccaaaaactagaaatcactgaaagttctttcgattagcttccgaaccactagtggatggcacggccactcctggcgctacaaaatgtgagataccttctgagatgttcttaactgctttgtcaaaattaacacaacccatgaaccaaaaatcatgccctttcaccgtaaacccggaaggtacttttctgatggg

SEQ ID NO: 21796 - DNA, 488 bp, Glycine max
  Clone ID: jC-gmro02800032h03d1
aacttgaacactctctttttgatattgatattaagagacacattggtagggcatacatacaaacagagagtacatgtttttagttgatcacgtaaaaaattacaaaagaacatacaaataacaaaataggaggaagaggagagaaacacacagagtaagagacgtggaaagttatggatattagacatattataagggcaacgctcaaaaaacttccagcatagagcagtggaatgaattacttaggccttctcccacttgaggggtttgaccacttcccatgtgaagtcagggtcttctcttccaaagtgtccataagcagcagtcttcaaaaacctgttatttccacccctcttgagatcaaggttgatggagatcataccaggcctgaaatcaaagttttccttcacaatgttgagaatctccttatcatggatcttcccagtgccataggtgtcaacaaacacagacaaaggctcaggcacacc

SEQ ID NO: 21797 - DNA, 463 bp, Glycine max
  Clone ID: jC-gmro02800032h06d1
aactcaaaaaagtttaaacccttaaatgatcaaggtccatattattcattcaaatgactgaacacacgagtccaaattaaagtctcaagaacacgaaaaccgaaaatcaaccacttaattgtttagtatttatatttacacaaattgttgttggccgaacgaggttcctcgcattcatgatggcagcatgtaggatgagttgagtcgagaggtaatgtctccccagaccgaaaaacattaacataatcggagcaaacgaccgaaccatgtccgcgtactgttccttcttcgaaacaaagttctcgtcccccatccacgcgccgtgtagcaacgcgctgtcaccgagcaccacccagaagaagcacagcgactccggcggcgttaaagaggtcgagaacgaacacgcgaatcccaacatcgtggaactcagcaacgcccacgacgcgagtttcacggcgtggag

SEQ ID NO: 21798 - DNA, 430 bp, Glycine max
  Clone ID: jC-gmro02800032h08d1
gggcagcagcaatttaaaactttgatgttgaaaaatttaaactaaattttacatcaaactagctattatagtaaaatcattcaaacataaataacttgaaaatcaattttacaaacgcccacctcaaacactcacacacatacactcactgactccctcaactctgcaaacacactcaaacacataaacagaggattgaacaaaacaccaaatacaaacctaccaatcaattctgccattactgttgctgttgatttggagggtttggcggagggggcatgccaggtcgaggaggaccaaacaccggaacaccgcttccaggtggcggtggcatgccatggccaggtggtggtggagccggcatctccggggcgagggggagcgggaggtcctctcaccatctgtccaggagggggaggccccatgggtc

SEQ ID NO: 21799 - DNA, 375 bp, Glycine max
  Clone ID: jC-gmro02800032h11d1
ggaaataaatagtaaatctttcgatatgttaaactgactttcagagatcttccacttagaaaatgaaaaattcaccttttgaaaaggaaataataatggaaattcttcaaaaggaaaagatgagcaaaggttggaaacgaaggtatcctcatagcaattcatagggtgaaataagacaattatcaaaaatcatcgtcatcctcctctgcaatatgcttagccagctcttgctcttgctgttgactctctcttctcttttcagcactttccttctctttgtgtgtgtttggtggaaaacgaagagctcgaaccgcctcattgtgcatgttaagacagaaagcaatccgagaattgaaggctgactgtggctcattt

SEQ ID NO: 21800 - DNA, 421 bp, Glycine max
  Clone ID: jC-gmro02800032h12d1
ggttctaacatttcttcaataacagcttttatcaaacctgccaacaagaagtttcttatcacagaaatacaattcaatgctaaagccaagagtatgaaagcgcccaaccattttcaagaccaaaggagctgttacaacaatgttgaaaaccagggccagaaaacctgtgggaactagaaacccttctgccgcattatcctaatctgatttcaaaaattccaacaagaataaacagcattgtcacctcactgttccttccgagctttagatctggcaggctttccaggtttaattactttaccaagaagaatcataacaccaggaacaatagttccaatgtaatacacgcttccatatgatgcaagagtttcatgcagacttaacaccatgaaacccacacaggaggtatttaaaacccaaa

SEQ ID NO: 21801 - DNA, 558 bp, Glycine max
  Clone ID: jC-gmro02800033a07d1
tttcttttttcaaaagaagacctttgaacttttaattcccacacaaaccattcctttgggtacagattaaatgcttcttaagccgctactagttacaattcaaggaccaatcataaaagaaaattaaaatgaaacatcctccattctctaaagacttctacttacaaaaaagagaatggtatttccttaaacactactaaacatagggcccgggcgaagtctaacacccaaatcaaccctgtatatgattatttggagagactacacaatatttctttacacaagacacactattgacatttacatacacaggcgattaactgaacatatttacaaacagacacaagataaaattatatctcttcctgtagactcaagcattcaaaaattactctatttgctagagggtattattgtatgaaggctcatcttctgtggttatgaatatgtagaactgaatctctaatatcacagagacttgtggtgtgtgaggaggggttttaagccagagcagtgatgctgcaattttcctgtccctgcaatggaattaaagccctc

SEQ ID NO: 21802 - DNA, 494 bp, Glycine max
  unsure at all n locations
  Clone ID: jC-gmro02800033a10d1
aacaaagtgcacattatatgcatacaaagcaccaatgaataagccccttaaccaaaaaaggcaagtctttcaaaacatcaaaacccccaacattcttcttccaacttgacatgaatattcacatatactaagcctaaatttgccatcttcccacttactaatttattaaagaaatctgtttaggtctttttttttctagcacaattaatgcctggtggtggtgtctctacaaattaagttacaattagctagtgtctcacatctgataacatgaaacttaccccagcccaaatagaccaacttccttcccacaaacaatttgaagcaacaagaaggatcagcatttgggtgctgctgacaaacaaacgcaaaaccacaggaaagaatgtcaaaagtttcaggtttcggctgtgtctgagcttatacagtcccgtctttcctgangagatcggcagtttgcttccacaacttatcttctttacattctggctgga

SEQ ID NO: 21803 - DNA, 451 bp, Glycine max
  Clone ID: jC-gmro02800033a11d1
ataatcaaaaaggatgccgatgggggtactatcttgacttgattattacaattacaactaaacacaatttggtgcacgaaattacacatcccaaattccttgaggcaaggtttggtttattaaaaaaaggagggttattgacaggcactgttacccctattatattattattacaggaaattgggagatttaaaagtaattaggattcaagctcaggttcatgaaggattaacaacaagggaatcttcgccctcgctcctgaagaagaagtaaccaacagcgagacccacgacgatggccacaaacacccctccgttgaaggacatcaccgacgacatcaacaagtacccgaccgtggagctcagcccgaagagaaacgctgagtcgaactatcacgcccaccttgacgcggtatccggcgagctttcgccgcagaagaggggccttgatc

SEQ ID NO: 21804 - DNA, 478 bp, Glycine max
  Clone ID: jC-gmro02800033b06d1
aatgggaattaactctgtatatttatctttggcataaatattactgatgatgaaaacaattgttagattcaatcaatggcaaacaagaatccaaaagcaatgaacaaattttgtctgtacagaggagcagaaacaaaatccgaacctaatcccgatcccacctatatatatactaaaaacaaacaaaaaaaaaaacataaaatgaaaattaaattaactggtgtgaattcatattcaccgtaccaacaaattcaatttcaatcaaattaaaataaacattctgtgaacaaatctacgcctcttcattatcttcccccgaaaacaaacgcggcctcttggcggttaccggcaacgggctttccacctcttgttcaacgccaaccttcttctttccgaaatcaaaccccgccggcgaccagaactccgtcagcggagccggaaggttcatgtcaaacccacggaactcgtgggaggagga

SEQ ID NO: 21805 - DNA, 575 bp, Glycine max
  Clone ID: jC-gmro02800033b07d1
atatcaactctgcaattaaatttgacaacatataatgacatctgttgtatttgatatttgtaacacagcttttgcacactctaaattattatagtaagatcttaaataatagaaaaagctattaaaacctctaattgaacaaagcaaacagcaaattatggctatgctaaaaagagagcaccatattagcctccagctataacttgcttttctgagcacaaacaaacgttaaccaaagttaccaaacttacaagcaaaacaaaaaagtacagagtcattaaaatattttattataacagcttagaaaaatctgaattgccaacagaatcttaaggcataacatataagaaaaacaaaatataagaagctgcaacggcgcaactttctcaaggccacttccagaagggacgaaacattggcatcacagcgaacttcatggtaccgttgttgcaatggaagccatttctctcaccacaggcatagtagtgaggctggcacttcttcaacacaaacttgaagccctttcccgaacctgtgtgggatttgctagcatcttagcctttttaatgtcacac

SEQ ID NO: 21806 - DNA, 497 bp, Glycine max
  Clone ID: jC-gmro02800033b08d1
gtaaaccaatatgtagctaattatttcaaaaaccttgatgaggggataatttgttcagcaaactataattttcccgttgaatgtctgacaacaatcgaaagtaaattgacacgcattatattttttttacattaactgacattttgcaatgctcaagctttaataaattaaagataagatgatgctatcattcatatcagcagagaatataaatgtgatgagtttgcacaatcattcttatagttgccatcactgcaaccaaattcatgccttcaaagcttcccatgcatataaggatgaacttaatctgctgaccaactctgcttcacaatttccctcactcttttattgtactcacgcttgttctcactaaacattcgagctgcttcaaagtttgcatgagaatttgggttgcgatcacaaagcattgactggatagatgtgagtatagcatcccctcataaataggactccactgattttgtatatatccaaac

SEQ ID NO: 21807 - DNA, 270 bp, Glycine max
  Clone ID: jC-gmro02800033b09d1
ctataacattatctttacagaggggggaaccccctcctcaaacgatcctacatacgatggagacctatcggccccaggccagaggtgtcccttaccgagcggggtgtaaaaccacacgaaatttcctattcactccttggtcccaaattgaagctttgtctccgcaatggtttatatcgcctattgaagtaattgttctttatttggccaatcattgttttattttccctgcgtacacacgaacataatttcttaatgttttcccagctt

SEQ ID NO: 21808 - DNA, 465 bp, Glycine max
  Clone ID: jC-gmro02800033b10d1
aaataacaaaatagcttataagaaaacttataccaggggaaaatttaaaaactaccttgaactatttatctatactataagttctatgtctgcctttacatatttcatttcttttggtggcttaaaaccaaactttccttttttaaaaaaaaaaaaagattctagagttacaacaacgggcaagtgttccatgactacccgataaagaaggaacaattacaaaggaaggaaggaaagcttaaacagctctaaaattgagagagaccagtatttttatatgttactcatcttcttggggtgtagagcccaattttgacttctgattgctagaaaacttaacacccaccgtttgaacctccgatagaatatactttactgagacctgtttggacactaactgctgcagctgctggtttgtaattataactttgatcctctttatgcctccacccggctttaaagatt

SEQ ID NO: 21809 - DNA, 371 bp, Glycine max
  Clone ID: jC-gmro02800033c08d1
caaaatccttgatgaaggggtaacgccgccacatcaccccatatttttaatgttgaatgtccgacaacaattgggggggaaatgacactcttgggtggtttaaaaaatccactgaaattttctatgctgacgctataatggattgaagagaagacgatgctatcattcatatcaccagataaaatggacgcggtgagtccgggcaatcaggctcatagttgccattactgaacccaaactcatgcctttcaagctttccatgcatatacggaccaacttagtctgctgaccaagtctgctccacaattggcatcactcttggattggactgacccctgttctcactaaacattcgagctgcttcagaattt

SEQ ID NO: 21810 - DNA, 423 bp, Glycine max
  Clone ID: jC-gmro02800033c10d1
ggaagccatgtatcccccatattctattataggagcccaacaacaataataataattataaatgccttgctgatcaattcacacccttttctgccaaaggaaagtggtttttcaagggaccaaaattaccggggaaaaggggaaggggcttatgcaataataatgtcctttgaccccccaaaaacagggccaggggcagctccaaagctcaccaacttaaccatggcacgacgagggttggtcttgggcttctcacacaggtttggcaaaaacacccccttttcagcatccaatttaaaaaaaagggcaatattgtgggggcacttctggaaacatgctggagagcaaagcttgccaatgaattgaggctcaaagaaggcctcaaatgaaattccaacagagtttctatcaaccccacatgcc

SEQ ID NO: 21811 - DNA, 571 bp, Glycine max
  Clone ID: jC-gmro02800033c11d1
aattgaatggagtgccatttcattacaaaattaaaagacaacgaaggacatggtatggtggcatatatactattccctaacgggacaaacttagatactgcccccccaaaagaataccatcagtgctaccaaaacggagatttctcctcaatagaaatctaatgcactacaatatttataccaaaaacactttaaaaaaattgttccactcgtcctttctgcttgttccttcaatcccttctctttgtgagcatcaggtttaccttcactcaaatcgcatcgtgcacatatgtagacggaaactgcattagtaagacttaagtagctaagttcggtgcctcctcaaaactcaggcaaaagccagttaaaggttcaatggttctgactctgcgtccctatccttcaattgccaatcttctgtttttggcttatcggaaatcaccatcaggcgcctttgcaagatacaagccaccaaaaggaaaattgagctcatgccaaacataacaatgatagggaatgcatcaacattgtacagcacaacacacacaaaaatgttgagaggaatgcggaa

SEQ ID NO: 21812 - DNA, 455 bp, Glycine max
  unsure at all n locations
  Clone ID: jC-gmro02800033c12d1
agggcaaaaagatctggaactatatttaacaaactagtaacaacaaccttaacaagatcattacctgcaatgaaactacaagcaaagataaattcaacacaagctgagacataaaataaactaactattccaatccaagagtagaaactcagggccttgcccaacaaaacagactcatacttcagtcaaagcaccactaaattaacaaaatctcactattctcttaacaatcacagatacccaataccaaactctcaaaatcaacttctggttctgcgtcgttccctaaggccatttccattagcataaggaacctcctcacgcccacgataaggaggagacctgctgtagctacgtccacgaggtgacaaactgcggtgcctaggggaccgnccacgaggactgtaactccttcgcccataacttgggctcctacggaatctgggcggactacg

SEQ ID NO: 21813 - DNA, 504 bp, Glycine max
  Clone ID: jC-gmro02800033d07d1
gtgaaaatgtaagttatcactttatatagtatcagttacatacatgacagtgaaaacatttattctttagctagctagcctctggtatcatatcatattatctatatttgtttcacgtacgaaacatttttggactcccaaacacaaaaaaacaaagatcattattccttggattgatgagggtgatgatcgctccaacaataagatggaagaacgcgccgttgcaacaacttgcatgcatgggcggcacaagagagagagattcgatgaatgaagtaagtaagtaataatgcgatcgatcacataattgtgcaagcagaggtgttttcttcacagaaatattcatcgcaacggctcacgtaacaaggcctgctcccaccgtaactatcataaacaggccttccataataagcgtcataacatggtgggggcccaccgccgtacccatcaaagcatggcccaccgggccgaccttcatagcatggaacacagcacaccccaatc

SEQ ID NO: 21814 - DNA, 433 bp, Glycine max
  Clone ID: jC-gmro02800033d08d1
atataaaatcattttatttggaattttttaaaagatcagtctgagcaaaagtttggccaacttaaggggggaaaacactcactactcggggatccataatgtcaaaacagaaaacacttctatttgttaataagaaatgggcaccgaatagaaatccagcatttccatccaattaacaaaattatgctttgaggcgtccaaagaacttctgcttctcctgtgtggtctggaagcgaccatgcccaaactttgaagaggtgtcgataaacttgagcttgatctcctccagagcaacacgagaagtctgcttaaggagggattggcgcaatgtaataacccttttcttgggaccaacgcagcatcccttgaccatgatataatcatccttaacaacaccatagtgagggaaaccccctattggggtaatgtcttt

SEQ ID NO: 21815 - DNA, 302 bp, Glycine max
  Clone ID: jC-gmro02800033e11d1
gtattaggggtttttgttactttttttttcccttcctacccttttttcccaaaaccccaaaaggaggggaaaaaattttttttcttcccaaaaattaaaattccccacctcccaaggggccccattgcagtggggaaaagatttcaccattttaaaagaaacccctggcttgttttcaagatcacctgcccaaattaacccaaggaaccgccgtaacattgaacccgaacatttcagggggcttaaaaaacaacatcatcccggcttttaaacaccagcatgggccacaggatcctacccct

SEQ ID NO: 21816 - DNA, 533 bp, Glycine max
  Clone ID: jC-gmro02800033e12d1
aaattctaaaaaatattaatattttcttgaaattccagtggaggaaaacttaagttgaaacatctaatcagtttaatttgacataacatatagtaattagtaacaaactatcgaggggaagaaagcagtcgtagacatcttattcacagaggacaaggaagaacgattggtggagtaacctgaagatgattcatgttcagctgaatgtcttctcattctgccatgcatgaaaaatgctggttctagagggaatggcatttcaagcgatgggttgctaagatatgaaacaatggttcccattgtaggcctatcatctggattttcttgtacacacaataaaccaatctgcatacacttttcaacttcgtttggaacataagactctagcagagttggatccagtaattgaaatgatgattcatccttccagtatttcatgcataactcaagaggtcatcaacacggcatgattcaaataacaagagttcttcttcccactaataatctcaagaaccatactccaaactgataca

SEQ ID NO: 21817 - DNA, 545 bp, Glycine max
  Clone ID: jC-gmro02800033f06d1
aacgaaacctatcatatagtaaaaaaaattcttgctgttcatttgaagtacaaatgtgattcatgtggctgagtaagggcttgtgtgggccgaaaactacgtcgtaacaaattaaaatggtccccgtcattgctttatctcgtggattggttcattgaacgtttgtataccctacatctttagctgaaaatgaggaccaaaattttcaccttcttcttcttcttcttcttcccttttctaaaggattaatctaaaacccccacgagttaagcccaaagaatcccccacctatttaccgatttaaaagattactactattattaatcgataacagggttcaattcctgaacccgaaccccaccggttgaaccgggtacttaaacccagacgtgtcaaccgaattctgaaacccctgtgtgaaatcattctgaagaaaccaggaattgttctggacccgttggtttctcacgccgctttgcacctcttcctccatcttttgcggaactgacgtgcccacatggcataacgtagggacatagaggtca

SEQ ID NO: 21818 - DNA, 476 bp, Glycine max
  Clone ID: jC-gmro02800033f08d1
ccttggattgggggggggaattacatataggaactctaaccctatgtgtatataacattacaaggaaataaaatctgcagcgaggattgggacacggagacagcagtcttgtggcgaggaacttcctatggtaatcctttgatctacagcatgaactgcttcacaaatcaaaacagcccaaggaacactgcttatgttaatgcatagggaaaggcaaaatgctacaagtatatcttgcgaatcccttcttgagtagtgccaactggtttgttggataatctacgcttataccgtttgagaacagatgccaaattctcctttccctttgggaaggctacgtcaccagcagcggttcctgtgcgacctttccggctggagattgctatctccacatccttgaccatctcaaacaccactgatgcagttgtgcattttcccggcccggtttgacgcagggggcagcatcccattggaag

SEQ ID NO: 21819 - DNA, 370 bp, Glycine max
  Clone ID: jC-gmro02800033f10d1
gttgaatacaaattttacaaagagacaactaaattgcctataaggggtactcacagaactttgttgtctaccaattgcaatagactgttgaaccaagaacagataatacgaaagcggcccttgtgaccacgccagaatattacagcaaaaatagagctcacgattatggcctagcttgtccaactcccatggataaaatgtatttcgaaaaacctcacctcattacagatgaacacgggggagtttgaagagatccttccgaagaaatttgccaaaaggtatggcggaaataaacgccacttttcgaatacaattgtactgatccacctgtgctgcaacaaaattcatcacttgagttggcgataagcta

SEQ ID NO: 21820 - DNA, 327 bp, Glycine max
  Clone ID: jC-gmro02800033f11d1
ggtgtccttgttttctttgttttctcttcttttttctggggaacaccgtttcaacacgacacaaaaaaagggggggaaaacccaaagggattttttactttcccccgaaaacacctgatacactaaccccccgggtgcttctttccccgggccaccacaaaaaaacccccccggagtatccccaaatttgccgcggaaagggttttcccccaaagcctttttttccctcccccccagataaaaaaaacagggtggttaaaaccccccgggccaaaaggaaccagattttcagtgcccccaaaaaaatcttcccctttgtcttaaaaa

SEQ ID NO: 21821 - DNA, 444 bp, Glycine max
  Clone ID: jC-gmro02800033g06d1
ggcaagaggccgttaaagcttttccataaacttttattctccaaccccaaaattcccaataagctcattgtttagtcacttggccctttaaaggtgacatatcctaaattaacacccccctggttggggggggggcccaaaagcatttgaaaatcaagggttggagcttaccccacttttccccaagccttaaagcaaaaattttaaccaaaacatttgaaaagacttgaaagaaagataaaccgactgggagagagatttttcacaggcttcctttcccaaccgggtaagcataaatagaggtaggccctctccttggctttccggtcattttaatcattgaattttggcccttttggtatctacatcggtcttgtgtaactattacacggggtaatgctgctggattgtgtcaatggccagaccctttaggttcaccacaga

SEQ ID NO: 21822 - DNA, 277 bp, Glycine max
  Clone ID: jC-gmro02800033g07d1
gaccatgagaatttttatatttaaaataagacggcccccctcggagatgaacccaatccgcacaacgggacacgcactgtcactaccatccatcaacactctgcacctcacaatgatatagttaaggaaactcaatgcatcgacgaacactccattctggggacgccaaccgatgactcttagacccatatcacccaccttgcttagaacgaaactaccgtactgtatcaccctagataaagcaaaatccttatgaatgaataccgctaccacaaag

SEQ ID NO: 21823 - DNA, 500 bp, Glycine max
  Clone ID: jC-gmro02800033g09d1
gtaaaatcaacttttcccgtcattaacaaggccatggaacaatttcagtgttatacatatgcacattattttctcgaattaagatcatcatcacaaattaatgtcccccacaacttattcatgccagattttagaacagcaattcatatcacagctttgaaggcgactgataccagccccacggttcatcagatatgtacttggtcacttgcttcacacttaaatagttctcgagtccccattctcctagttcacgaccaaaaccactacgtttaacgcctccccatggagcttgaatgaagcttggttgagcacaatttatccatacaattccagcctgaatagcctttgatatgcgctcgcatctttctagatcttttgacattacagcagaccctatagccgagtgtgtgtcatttgctagttcaatagcttcttcttcggtactgaatgttttcacacatagcacaggtccaaaaacttcttctctccaatttgca

SEQ ID NO: 21824 - DNA, 512 bp, Glycine max
  unsure at all n locations
  Clone ID: jC-gmro02800033g10d1
aaacatcnatttctgtaaagaacttaatattgaacaacaaatttctgtataaaaatacatattccattacaaggaggtttagactgtaatattttccaacacccgcatgatccgcaagaaataatcccttatccaattctgttcaaagagactctttcattcggtcgagtgtccctttccactggagatatcaactgtggcatagtcattcctccggaaacaatgatttcaatgccttctcgaatggaaagatttggtcttataatatctttggagataaccaaaaatatatcaccaatatatagatgattcgtagggacaaaaacactacaaagctcttcatcttcattatgtttctgtagaataacagctgatgttataaagccaaatgcatattcaccaacacgcgggtgacggataattgctacctcttaaaggcagtggtattttgatctggagatattgcagcactgatctgcttggatgcagagtatatatgcctaacaaggggc

SEQ ID NO: 21825 - DNA, 316 bp, Glycine max
  Clone ID: jC-gmro02800033g12d1
ccacagcaaaaaagacattattggttaaatggtcttgggattccccctgatatcagctaggatagacagtaagacccaacccccacgagaaaacctggagaagcaatgggcaaaccaaaaatttctcaagataacatatttatgactacaaacaactgcttatgttgcacaaaagaaatgggtatctaatagttgacaactggtaatatccctgtagtttgattcgctactcaaaaaacacaattttgcaacagaaaactatgatgggtcaacctagatggtgactaataaaactcaatcattcatctgcagatgt

SEQ ID NO: 21826 - DNA, 473 bp, Glycine max
  Clone ID: jC-gmro02800033h06d1
aaagcctcaccagaagtcatgaaatacaattggcatttgctgaacagggtacaccaagagacccagcatagggccacccaaaaaatcccacattatgacccaattcttttaaactgccagaaatggaccacaccttcacaaccgaacacaaggacctcgggttggaagggaagaatcataatttcttgcttccctcgattactcattaaatataggctcgccatattaaacacattacacatgctaccaatctagtcttaaaaaaaaggaaaaaatatatgtaaaaaaaaaattgctaaaagtacaattgattatgtcatgtggcgattgatgaattactgcggacatggagtggaacaaagggattgagcagaaacctgcatccactctaccagattcagatatacagtaggaacagcacaatcagtatttgcttctgttgaagggccgttgtatattactcccgagtaact

SEQ ID NO: 21827 - DNA, 495 bp, Glycine max
  Clone ID: jC-gmro02800033h09d1
cccttatcatatctatttgttattatcgttattatcccacaagtatccaagaaaagtcttggcggcatccaagcttggaaaatacgtcggttcaaggaaaatctgagtcaacgagtcagcccgagtcgcaactcaacccaactcggttaccgttagcctcggagcttcccatcaccaccgccaacacctgcttatacgcgtagaagaatctcttcatcgccgcctcaatgcctgcatcgcctgcaacaagtgaaccttctcgaacgcgctcttcgaaacgtagagcttcatcgccgcctcttgaatcctcggtcctcccttcggatccacctccacctccaatatctccggcaccttgtgcctcagatctctgcacatcttcgtcagttcaaccaactccttcgacctgaagcagaacgaagccgtttcgccgccggaggatttcaccgagagctgattcttcagtctcaagaaatcgtccggatccatcatcag

SEQ ID NO: 21828 - DNA, 427 bp, Glycine max
  Clone ID: jC-gmro02800033h11d1
cattaaactgaggacaagcgggactatatatacgaatgcataaccgtccaatgtattttggatttcctactgcactagatgaatacacaaatgcagcatacggatggaattttcatagacatccctctccatcaaatttccatgtagatcactgaacgaatagcccacctttagaagaatccacatgaatgcaggctgcacattatatgaaaagcttgcagaaggacaaacaaacccatccagtatcaacgtgggcacattgataaatatttgatgataccacgacctttcacgctgagttttgaagcctgaagctgcttcttttttggtgccctaaattgctgcaatatcttattcatctttatacactgctgatcttgagcagcttgttttgctcgtgctctaatttcttatggatcaaatttag

SEQ ID NO: 21829 - DNA, 263 bp, Glycine max
  Clone ID: jC-gmro02800033h12d1
gaaacggcaagcataggaatagatctcattcgatttctaactatatataaggatatatacacacaaggaggaaacgaggagaaaagaaatagcggatcataacagaccctccatttattattccaagcgattgtgcagcgcaagtgcctagcctatctataaaattcaaacccaaggggcctcatctgttctttcttcaccattggctccctttccgcgattgaggctcaaaacccgcttgaactccgggaagaatgacattg

SEQ ID NO: 21830 - DNA, 471 bp, Glycine max
  Clone ID: jC-gmro02800034a01d1
ccttggagggggggggggtattacatatagtaactctaaccctatgtgtttataacattacaaggaaataaaatcttcacccaggattggtccccctggacgaggggcttgtggggaggaacttcctattgtaatcctttgatctacaacatgaactggtttacaaatcaaaacagcccaaggaacactgtttattttaatgcatatggaaagggaaaatgctacaactttatgtggcgaatcccttcttgagtagggccaactggtttgttggataatctacgcttatcaccgttgaaaacagatgccaaattcttctttccttttgggaaggcttcttcaccaggcgcggtttcttgtgcaacctttccgggtggagaatgttttttccacattctttaccttttttaacaccattgttgcagttttgcattttccacggcccggtttttaccatggggccctttccat

SEQ ID NO: 21831 - DNA, 492 bp, Glycine max
  Clone ID: jC-gmro02800034b01d1
aaattaacaacaatcttttatttattaagatatacgagatgtccaaagaccaataagaaacaacgacacgtacgagtaaaacaaaaagaaatcatgcgcgggggaacatgcactgatggacattcaacaatcataaaattattacaaccaaggtaaagcgtgacgcacgagtagacctaattaatacaaaaggagaagtaagtaagcgaatccaagagacaaagtggtgattaaactcactcccaaacgccctacgtggcctgcagagtcctctacgttagcaaactgatgctgaacgttggtcttatcagatttcgagagctgcacctttcgttggtgtgaaggcaatatgcaagggtacataacagagtcctctttgttagagtggtcaagccctagtaaatgccctatctcgtgcattgccgcactctccaagtccaaaactgctttctcccacgacaacctaccggtttcactgggaagagcccacaa

SEQ ID NO: 21832 - DNA, 484 bp, Glycine max
  Clone ID: jC-gmro02800034c01d1
aagtaaatgatttttcttgctatcaaaattcactttacaggtaagacaaggggcaccggaaaagctttccccaccaacctaaaccttccaaaccctataaacccaaactaaaaacaaaaaaatggacatttttcatcactcaacaattctcttaatagagttcaaggacccaacaaaagatagggaaggaaaagcttggagctatggaaaggtattaatggtaacacaaaatagcaggagtaaaaaagagaaggcctgcatatgtttctacctcatctaacattaatggtcaatatcggttacaggtgtcctacccttcatatgtcctaaatccaagcaatctgaagatcatattggcaaattttccagcttcttaccctcaaaggtagccaattgccatgttgtttgccctcagaaatccaaccatattttggcatttctcaaaaaacttccccagataggactcaattatctaattttagct

SEQ ID NO: 21833 - DNA, 470 bp, Glycine max
  Clone ID: jC-gmro02800034g01d1
atctggcataagagtgttatacactggagcaaaggctatattgaagccgaattaggcctagtacacctgctgaattaatttataaggactaataaaaacaaattaccggctagctataaaaaatctcaaaattactcccaaaaaaaatatcttattgaagatttatcgctcatgacaaatatattatcaagaagatattggcgtttctcaccaaagcaagacagcatttcaagcgccgtcaacgaaccatagcccacttggctagctatacatatcgtgagagcccgatcttttaccgagcttgattttgtcgagctgaacctgtgtgtccataaacatccccattctttgcacttcaagagctttacctaactgcattctatgggtctccaaattcaccatttgcctcaggttaaacgcctgcattctctaatacacttgaccaaacctctatatcgccttcgccaacc

SEQ ID NO: 21834 - DNA, 464 bp, Glycine max
  Clone ID: jC-gmro02800034h01d1
aggctaaaaagccaccaaacacgtattatgattttaatataaacgtacacaaacaaactctaaacgagttttttttttttttgggggttgttgttgttacaaaccccaagcaagtttgaaaaagtggtacacaataatgaaataatatatgaggcatctcagatggccacactatgcaaaacaacagtttcaatggtaagtccaggtccaaaaccgaacaacacaccccattcaagtccttcacctgtggttttatgtccattttcagcagatttcctcctcatctcatccaagatgaaaagaacacaagcacttgacatgttcccatattcactaagcacatctttagtggccttcatttttcaggtttgagacccaactttgctcacttgggctaaaatcgcagcccaccagggtgtgcatccaaaaatggagttgtatcagagatgttcaatgggtgaaag

SEQ ID NO: 21835 - DNA, 436 bp, Glycine max
  Clone ID: jC-gmro02800035a03a1
cggtcatgaacggcggcgctgaggcctccgtcaatcacaggcgcagacaccaagcagcttccgctaacggcgttaagatagcaaacggggccatggcgaagccgtcctcgacgctctgctacgacgcctcgttcatgaaatggaccgcggcggatgctgtccacgtggcgacgcatcattggatgccgtgcttattcgcattagggcttctcttcttcatggccgtggaatacacgctcctcatggttccgccgccgacgccgactttcgatctgggcttcattgccacgcgttccctccacgcactcctcgagtcatcgacgaatctcaacacgctcttcgccgggctcaatacagtgtttgtggggatgcaaacgagctatatcttatggacgaggctgaatgaaggacgccccagagccacgatttcagcatt

SEQ ID NO: 21836 - DNA, 462 bp, Glycine max
  Clone ID: jC-gmro02800035a08d1
gcagaaaacttcttgttcatatatacacgggaaacaatatttacacatataatcataaagtcaacaatggtaattccctgaacgtagctatctgagagaagaactgttaagtcatataaccgtcacattgcatgagaaaaaaacaatgttcctgaaggtcatatttgctatatctatgataatgacgttacagacacaaaggggcttacacctcatttaaaaagaagaagaagcatgactccggcgttagatatttcttttacccaagctgtataccatacaggagactgctactacagttggttgtcatgagagttggcctttgtaagagctttaacaaagtaattgcggatctctggtattatgcgctgaatcagaagagagtgccctggccttgaactcaatttatcaaattgctccaagataaaaaggatgcatgcatgcctcaatgatattgcattg

SEQ ID NO: 21837 - DNA, 528 bp, Glycine max
  Clone ID: jC-gmro02800035a09d1
aaaagaacttgcccataagagaacatttttattcttagtataataacaagcaagacaacaataaaatttgttactctagaacttgacgaagaaagtcatagacatttcatttgggaacaaaatgcagagaacaataactgactgaccctgtccttgtcctgcatcctgtgctaaactaaaaacagcgaaaacagaataataaaaaaaaaaaaaaaaattgaacacctcaacaacgaccacgacgaacaacaagaagaagacacaagcaacagaaacaaagggaatgactactgcgagacagatttcaagcacatatataagaccactgctcttcatcatcttcaccagcaggaacagcagcagcagcagcaacatcatcagccacaaaggaagacagaggcagcagataaggcattctgtcaaaggtgcgagcaaggccagcggccagaaccgctgctgcgttgtcgtggctgacatactcctgcgcgcggtgcttgagtgtctcgaacatgagctcgggctggtgct

SEQ ID NO: 21838 - DNA, 473 bp, Glycine max
  Clone ID: jC-gmro02800035a11d1
cattcttacaaataaaaataaatgaattgaattgaatcaccactgtcaaaagtatactacaatctaaaagctaaaactagcgaataaggcccaagtactatatatgtacaagaacaaattaatcccaaataacttaaaaaaatatataaaaaaacactgaataatttttttggatctatggatcagtattgagggatttcaatcttgggtatggtcaaattgaaacgggacttcttggatggatgaggactggtaacctcgtcatcgacgaagaaccttgctgagaagtccggaaaagccgggaggttgagatcgaaatcgcggtggcttcctgtgtgagtggaccccactccctcagaggcggttacggcgctgttaccgccttcgtagtgacaacgtttgtgtcctccaaggcctgtcctgtcgaaaacgttttgtggcagatggagcactcgggggtcctaccaccaccg

SEQ ID NO: 21839 - DNA, 416 bp, Glycine max
  Clone ID: jC-gmro02800035a12d1
aaaagaacttgtccatgcgagaacatttttattctaagtataataataacaagcaaggcaacaataaaatttgttaccctagaacttgacgacgaaagtcatagacatttcatttgggaacaaaatgcagagaacaataactgactgaccctgtctttatcctgcattgcatccaggacaaaactaaaaacagcgaaaacggaataataataaaaaaaaaattgaagacctcaacgaccacgacgatcaacaagaagaagaagaacaaccaagcaagcaacagaaacaaagggaatgatgactagtgcgagactatttgaattgaagcacatccattaataagaccactgctcccccagatcttgagcagcaggaacagcagcggcaacatcgtcaggcacaaaggaagacagaga

SEQ ID NO: 21840 - DNA, 316 bp, Glycine max
  Clone ID: jC-gmro02800035b08d1
gttaaattaataaatcttttgacacaattaaatcatatacatatcaaaaaacaaaaacattatcaaaaaaaaagatatacataaaaaacataaaataatataaataaaaaactaaaaaacaaaaacaacatataataaataaaaaaaaatagcaaaccactaaaaattaaaaaaacccacaacaaaaacccaattaaaaaaaaaaatagtaaaaacacttacacccaaaaaaaaaagaaaaacaaatactagaagaaaaaatactcaaagaaaaaaaaaatatggaggaaaaatggaatatacaaaacaaactgta

SEQ ID NO: 21841 - DNA, 414 bp, Glycine max
  Clone ID: jC-gmro02800035b10d1
gcgtaaaacgggcaaataaaacttaaatgtaacacattgttctgaaaaaaaaaacctcccaatattcactgtttgcaaatattaatgaataactagccaaaagatttgtttgccatcaaacaagaccgagtctgaaaaaccttggaaaagtctgggcgctagcagcattattaccaagaacactttgtatttttaatattctccaaacctcagtgttatgcttttgccaattcctcttctttcttgcccttgcctcctgtggccaacttgtatcccccatagatgagtagtccccaaccagttaaagagacaatcacaaagtgctcctccttccatttagatgggctcattggatctttccagcaggcaactttgggagggccatggtgatcggcgaggccacggcggtggatg

SEQ ID NO: 21842 - DNA, 458 bp, Glycine max
  unsure at all n locations
  Clone ID: jC-gmro02800035b11d1
gaagacgaacttcccttaaaaggtatttcactctgtacattttcacagtcgaaaatctattggctataataattgcaacaaccgtggcaccaaaaaaaaattactcaatgagaaaaaaatgtacaatattgaatattttcattgattcatttatagttattccactggcactggctctgcaaaagccaacaattttttagctgcgactgcaccgtttccctgaagtccttcactttcaccaaacaaaaatgggtcgaacaaatccccattcccgaaccgggtcctgacccgacccgaacggtctttaaaagataacaaaccgggccgaacccgacgcccttcccctgaaccaccaccccccacgccctcgtcgtcctctctccgncgncatcctccgccgtgtattcgtccaactcctccacgaatatgactccctccggcaccggcgtttaaccgga

SEQ ID NO: 21843 - DNA, 485 bp, Glycine max
  Clone ID: jC-gmro02800035c08d1
ggaagaagaaaatatccattagaaaaagaccgtagactttggccattttttcactccacacggagccaaagccaaatccaaagccaacaacaacgccaccaactcaacaacaggaaagtcctcataaaccccataacccaaaccaaaacccattgtctccttctcctccttctttctccctctctctcatacacaaagaggccatgggttacttggacgatgatcatgatcatgacacattccacgaccacaacgacttcaacagaaggatactcatcatggctatagtttccttatcagtggtattggttcttggctttacacttcacctctacgcaaggtttttccttcgccgcagagccgccatataccaactcagcctcaacgtggcacacgcacacgccgagccagacaacaacacagggctcgaccctgtcctcattaccaccctccccacctttccctttaaacaaccaaccaacgat

SEQ ID NO: 21844 - DNA, 322 bp, Glycine max
  Clone ID: jC-gmro02800035c09d1
aaaggccaaaacctatttttccaaaaaaagaatcaagttttggaatttgccccaaagggcaaaatttttcaaagaagggcaagttttttggtctaaccggccatggtacttttgaaaagccttcataccccatgaataaggcccccaaaaattctccacaaattccttgtggaaaattaaaaagagggaaacctgaaccacgaatggaaatattggccaatttttgggtccatctggattaatccctcctggcccctggggggttttttttgggggctttttctggaaagcctttgggactttttccccgggctgtacaggg

SEQ ID NO: 21845 - DNA, 440 bp, Glycine max
  Clone ID: jC-gmro02800035c10d1
cgcaagccatgccattatttacttgaacaagtctatgccaaatccacaacactactaaaaggatgtaattatcagaaccccatgaaggggatacaataaagctacagacaattaacttattgcagcttacatcacgacataccttaggtcaggtcacattagcaataaagtaggccacaataataagagaagttatcatggtagcaactgtaattacagggctcaatattgaatgcatacaatcatgataaagagcccttatttctttccacttttcttgagcccagaacctccaaagcttcccttctgttgcgccttggctttcaactcctttagcgccttctcctattcctttttcttctgaatgttagccacattaatctcgtcgtaatccttcttatcagacttgggtttctttaaaggcttagctttttcacctt

SEQ ID NO: 21846 - DNA, 369 bp, Glycine max
  Clone ID: jC-gmro02800035c11d1
atataaaatatggtaaggaaatattaagaaaattggaccatccaaaaggaatatataagaaaattgaccacgcgggagagatggtaaacatcatcgtcgtcgtcgtcgtcgtcaacctcctctttacaaggaaaattttcgctgcaggctcaacctaatcgagtgtcttaaaactacatgagacaaattatacttttgtttcaaggtgggggatggaaaggtttcaaaaacaatggaattgacatgacagatgagttaaagactaacaaaaaagagaaggcactggtaaaggaacgggcttttccttgttctgccattgtagaaaattgatggacgatgctcttttttctattaaatcctttagatctt

SEQ ID NO: 21847 - DNA, 532 bp, Glycine max
  Clone ID: jC-gmro02800035d08d1
aagaaaaataatattcatcaatgattagaacgctgtacactgggaagaagaaacacatgagcccaaccatttaaaatttctttcccctttgcaacatttctcccagggaacaaacagaccaacaccaaccaagcataaggccccagctatcatcaatttccagctggataaataaataaacccaacatttttgtttgcaacaaaagttaaatttattaatagtagtaataatagtaacatattaaatactataatcactagccaatcaagacacacccctcttcgagtgagtgatgaaccttgcaatttgcatcaacctttttcaagtttcaaccccaattaaccgaaattggggatccaaccaggtgcttcccatcggaccattctacccttccaaaagcgttttctgtatgctgtggcgaacccgatgacgaaaacgtgacggtgaacgttttcttctcgttctccttgaaacttaacacttgcggttctaccgagattttaacgacgcagtgtctgacgtcacggaagc

SEQ ID NO: 21848 - DNA, 486 bp, Glycine max
  Clone ID: jC-gmro02800035d09d1
ccaaacactcaaatgctaagagtgaatctgcaagtgaaacaaattatacaagtagtatacactagcatctatggttgatatgatcaaacattgaatttaaccatgtggcagtgcaaaactaaattgtcaaatagttattacaagttcacaaaattctttgatctatgttgcttcttcacttaaaatcccaaattcccaatcgaaggatatttaacctttttcttattcatgacatggaatgctctcaaccaaaaccagaaggcaaaaaaaatcaaaagttctagataagctctttagctgcagcaacaacagcttgcttagtgataccaaattctttgaatattcttccagctggagcactagctccaaaacgatcaatgcctattgcttttacctttgctcaacaattttctcccacccaaatgttgaacctgcctcaatgctaactctggctgaaacagcagcagggaaaacactctccttgta

SEQ ID NO: 21849 - DNA, 342 bp, Glycine max
  Clone ID: jC-gmro02800035d11d1
caaactgaaattcacttgattcttcaacaaaacacacaggatgcatggtgtccacccccttacatgcatgtgtttattattttggtacagacaacacagtacagaccacgtactacttttttattacacaaattataacacttgaagaccattttctttcatttgagtaaactatattacatattttccaacataattccttaatcaccaccgtcttgaccgtaaccctcaccatggccatagccctcaccatgaccatagcctgagccaccgtcaccaccaccgtcttcggcaccgtcaccgtcaactacccttccttgacttcttccagatcctgatccg

SEQ ID NO: 21850 - DNA, 519 bp, Glycine max
  Clone ID: jC-gmro02800035e07d1
actcaaaaagtggcaccagcccccagcatttcttatcttccaaaattattaaagaatgtctctctagaagcaaaggaaaaaataataaaatatgtaacttgcctaatagcctgaaattcttgaagcttatcttaaccacttgggtttctttcctgccatctaatatctagatatgtacatggtgttgagttggccttggtataggtatgtacagaaacatatctctctcatttcagggtatgaatgccccagcttctgtagatcttgcttaagtcaaaattctatcacatggacaaatgtgcatttcttctcactgtcttgcagacaagattacctcgctaatattgggtaaaacgttcattaccggttccatgaccttaagtatggctttcccatttggtcatgtattgaagaattctgacgtggcaagctcatccatgccatatcatcaggcaccaagccactaagtgctccacgttcagtgaagtaatctaatggacgagaagccggtggtgcaac

SEQ ID NO: 21851 - DNA, 298 bp, Glycine max
  Clone ID: jC-gmro02800035e08d1
aaaagcatacaactgtatctagaggtgggcgttcttaaaaatgaccatcgaaatgtgcaaccttgaatcatgaatatggactgtacactggcacccatcgagattcactacttaaccgaacatagctgaaacgctgatgcaaagggaggacggttatagtcagttgggcactcttaaccacttataaacgggtgccaagaaaaagttgcgctttgattaaatcagaccagaatggaagctccatgtgggccatttagcttaactgcctacacgaggctttgctcggatctttggatgc

SEQ ID NO: 21852 - DNA, 506 bp, Glycine max
  Clone ID: jC-gmro02800035e09d1
gatcataaatcatttattattagcatttcttcatggaaacctaaacaacgtaattttcagtctgccagtctgccaccttcaacgagtataatgtaaaataaaagagccaacacaatcggtccatcgttctttacatgcagcctaattgtacttacagcagctcccactcagtttcagaagcacgctgaacttgcacattcttcgagtccatgtacgttctggagataaatggcaatgaagtttgtgaaaatccttgttttggctcaatatcggtgtctccataccatattgctagctgttcatactcctttgataacctcttctttgaagaaaatgcatccagaattcttttcttatatgatctaagcttttgggctctacaagagactgcatagagttcactatcgttcacaaatacacagttttcctcaagctttggatcattaatcaaatcaatgtctttcaaactggatttaacagagctgaacagtgattatcatttgatt

SEQ ID NO: 21853 - DNA, 372 bp, Glycine max
  Clone ID: jC-gmro02800035e11d1
aaaaccataatccatagatattcttattgcatcatcatcatcatcaacaaaccgcattacaaaagaaagatacagccacctggataggcccatagtggttcccaaaacacacaagcaaacaaaacaaaaactaacccaaccctgagaaaattaaagaaataagaaaccccaccaatagggtctcacatctctctaacctctagaacacaccaatactacgaaaatatatcaatgttccctgaaaccgttcgacccagtcaccgccacgtgcacaacctccttatttaattattattcacacgtgaccgcgttcttccctaattactggctaataattattttatattgcaagaaccaaaccgggtacggatt

SEQ ID NO: 21854 - DNA, 483 bp, Glycine max
  Clone ID: jC-gmro02800035e12d1
gtgcagaaaaaacaaatcagcactatattttctgtcatcactataaaaaaattcaaaatttgtcaggacaaaattgatccaaattcaactcaaaagtgaaaatcgtattccataaggagcaagcttacagggattgacaagctgttatcaacaaactgccatggaactcctgaagagtatacagaagaaaccattcctacctgcaatgtttcttacatattcttcttggaacctgaatgtgacaatttcctgtccaaggattgtagttggttgcggaggttctggttttcctcaagtaagcgatcatactcaagaaggaacccctcagattgttttctcagagcagctacattggcttcagcagcatctacatcttttgtttttgactgtagttcagattcaaggcggctaagttcaactttcaatctggctctttcttcctccacagccttaatttcttccgaatttgcaactttttcatct

SEQ ID NO: 21855 - DNA, 538 bp, Glycine max
  Clone ID: jC-gmro02800035f07d1
aatcttgttaacaatatattgtcaaatttgatcatacaattggggatccgtctaaacatgaaaataggttttttagagccatacaatcaaatatactacaaattgaatgataacgtgtatacactattataaaagagccaaggcaggccaaatttaatttattgccttccccttcaagctaacttccgagtaaccttttttaagttgccactaaaaagttttcatattctgcttatatcacggccaaacacaagagtagtagcccagttgatagctacatagaatctgttcctccagctgatgactcgagttagatatgccgagcgccaaataaaccaactgacaaaacctgccagggataaccctttgccctccttgttctgtctgaggtccactagagccttgtaactccctatagatgccatgcttcccatgtgcttgtaaacaaactgatccccaaagtctacatcttttgcactgtttgcacggcctccattggctttacctattttggttagtaagattcctaaatatttac

SEQ ID NO: 21856 - DNA, 563 bp, Glycine max
  Clone ID: jC-gmro02800035f08d1
aacaacatatagcatttgttgaaatgaacattgtcactttgtaattataattattacaatgacacatgacatccggaacagtcccttgaacataaaatcacaagcacacctcagtcaaagaaagattcttttcgggggtaagaaaatcgggggggtaatacttgttatagagatatgagaaaactgttattacaaacaaagaagaacataaatatttccaggatattcattcctcaagcaatcgaattacttggtattttgtgctaacttcacttatgcaacctctttctgcagattcttccaccgtttcttttctcaaaataaagaaccaaaaaaatcagagaatgataaaagcctcattgttaaaatgctcatatatataatcagaaggctgcccatcctgaagctgtggtcgacccggaggtggtcgttgagggaagatttttctgaagttgagagaaatctgataaagcgtcggttgaatgtttcacactttcatatgtccctttatgacctgtagcgcaaccggtggaaagcaatcgagcaggaacgggatcatttgg

SEQ ID NO: 21857 - DNA, 475 bp, Glycine max
  Clone ID: jC-gmro02800035f10d1
gaaggataggaacattaacatatggtaccaaaaattcccagacccaacaaatatacgagacaaggaataaatatcagacattatgggtacccagtacttggtgattgccactggacaccaaccaaaacttcgactcttgaaattgcgacaccttaaaaacaatggacaagaaagaaagaaagaaccgtttcattataaaatggcttattgatgttgctaaggctgcctctgttgtttgttgatcagatctattaggtagtaagatgaagatttcatagagggaaaaatagccgcaaaattctgtattattttcattcagtctcttaagaacttcaaagccaaaatctgtacttatcaaagaggcctaaacaaggggtgtctacatcttttaagcttcatcctacagttactttcactggttcttggcttcaacaatcggtctatttcaattcctgatttgaaggcaaaattgcag

SEQ ID NO: 21858 - DNA, 550 bp, Glycine max
  Clone ID: jC-gmro02800035f12d1
gttgaaaaggtttgttttcttaaacaatgttaaaaataaaaaaattacaatatttaaagttcaagcaaatattctactaaatataaactaatcataaaattaaaatttgtcatgttctattctataccctgtggcatgcaccaatggttcatctggaaaaacaaacttaatccctgataaatttgcccttgagcatcgatactatgcccattacattaacttctgtaagtgatgtaacaaaattacagtatcttgtcagccatgaaacaacactcacctcacatgtacccattccatcgcctctttcagtctaaggcctgccccgcctcaggctgcatgatggacatttatattgctttatgctctcagcctttgcaggggtaatcttaacacactttccatggaaccacctatcacatatgtcacagcaaatccaaaactcatcagcgttgtaatttccgccgcagcttccacaaagtggttcattatgctcatcttcatcctcctcataaccctgatctacaaactttgggttgctttaacttgccca

SEQ ID NO: 21859 - DNA, 560 bp, Glycine max
  Clone ID: jC-gmro02800035g08d1
acaggccattaaaactgtatgcatgtgaatataaaattgtatccatgtgaaccctcagcatgcccatgcccttgcctgcaaatcaccaatgccctagcctgctgcatgtcaccctaacctgcaaacagtgccctagctggagctggtgtgtgaaggcgtgaaggcagaaccctagttgtagctggtgtgtgaaggcgtgagggcagaaccatgagtccacgtcggtctcgcaagaaccaatggcgggactgatccacgttgcaaatgtcccgccattggtattggcgggttgcccagtcagcagctgtctcgctggacacataccttgtaccgcaattggtgctggcgacacccagccacgtcagcaccattctcgccagagctagtggcggcatcgttggaatcgctgatgcagctggcggcatccaatacaaaacagacccccccgcaatttctttcataagagaccctaatccgtaaatagtttataaatatgaccctttgtcgtaaatttgccaattttctgtcaactttgtggtggaaagttttgtggtcaaatt

SEQ ID NO: 21860 - DNA, 501 bp, Glycine max
  Clone ID: jC-gmro02800035g09d1
gaagaataatctaagtagacaacctcattgaaattctccatagagttcccatgtataccctgcaagaacttatataccataattcaaacataagttgcacacaatgtgcaaaaaaataatggaccaagcaatctgaagtctgaacaaagttcagagtcaacatcaacatctagatataaaagtagtggcatgaaattaaaggcactctgttttatattcagcatagactatattgcggcttagaaagagatgagatcatctttcgatgacggctgcttctttgtctcgtgtcccccatctgatgcttccccacctttcttcccaaaaatcatctcatcgagatcatccatcatgtcatcattgctccctccctggacaccagtccttgatccagctggctttcgaatcaaagcatcttctctactatgatagggtgactcgtctggttcaacagcaacaggtttcataacttgttcacgatgaagtggagtatttgcaggc

SEQ ID NO: 21861 - DNA, 586 bp, Glycine max
  Clone ID: jC-gmro02800035g12d1
aaccattaatgtcatgtatacataaaaacaagttttatttttcaaagcatggtatatgaattaactcacctataactaagctacaacagaaattaatcaaagcaagagtaggtagtgttatttcacaaaaacaagcatcatcaagcttgtttgattgatgaatcatgattcttggttgtgccaagagagcacgagatcttgcaaggcatgtttccaatccccccaatgaagttcctcaaactccaaagcaccctccagcaccttaaccgccactaaaagaagttgatgaggcacaatctcaaggagctcaaaaaccaaagccactttccctttgagcaacgcaattgcaccgatgctctttccaaccttaaccttaaaccccaacagccctcccacttgcttcaccttcttctccaccaccttaactctcgcactcgaagtgaacctcttgtctcttttacttctcgaatcccacttcgttttgaacaacctcgttgaatccaaaccccaagacatcgatattatgtcaaacgctgtcacacccgaacttatacctccttcgtaatataactacctttcacgtagc

SEQ ID NO: 21862 - DNA, 555 bp, Glycine max
  Clone ID: jC-gmro02800035h07d1
acaacccaatataatgcataaaaacctattgggattaagtttgagccactggctttttgaatcagttcataagaaggattacacgaggtatcaaagctatctgtgtcagttcagttcactgtttcatccactaaattcaatttgcttcctacataactatttccaaccagatcaccgaataaaataaacaaatgatatttggcattgtaattaaaatttctattcaccaagaacaaacacttgtacttcatttaaggcagtattggaagaatcaccactagaaccattacccccaacatgtcttcccatgatgacatcagtcgtaggaaatgagcatcaagctcgtcactggcaagcagagctcacaaataatatttttacgatcatccccagtttatcatccatcataaaaccatgttgagcgtccattataagtgaggagtcctttgagaaaccctagctttctcggcatcaataatagactccatcaacttgaccgcattatcaagcttcccttttgcattgaccacaacataatcaaaattcttgacatgc

SEQ ID NO: 21863 - DNA, 499 bp, Glycine max
  Clone ID: jC-gmro02800035h08d1
gtaaatataacataatctgttatacaaagccaaggagggtttattccttagtcaagagaataatacagcaagtggcatttatccctcgtgacatgcactgtattagaacagtgttactgttttggaaagaccaagtcaagagtggattacggaacgaaaggagttgcacatagcaagttgcttctgcttgtgttcttgcaagagtcccccccaacacaaaatgttctcatgaaaggataagttgaaagctagtagtcacattaacaaaacatgtcttgcatggacatgttataaacaaccactactacattacaataaacaaccaaactgttgaaagaaatagagaatttatgtacacgggggtctgaataaatgtatttttcccgtttttgtgttttgttttgtgggatatggtggaggagtttcaagtaacattccaattttatggtatcttcccaagagctggtaaattgtgatcccagaaactgaatggtttttt

SEQ ID NO: 21864 - DNA, 437 bp, Glycine max
  Clone ID: jC-gmro02800035h09d1
gaaagtcaaaagtatcaagcatgtaacttcttaacattcaccaccaagaagctggcaacatagacacaaaggagtaaattcagcccatagtaaaacgcagcctccatgttcatcatttcatttccctatacaaattctgttagacatgacaaccttagcagaacatatagtaccagttccaggagaacactttctggaccccttataccctcctatgaagatttctttgcctatcatcacagctgaagcagtggtaatgccattacaaccccaaagatggagaagagtaatagcatcatccacgttggaaatggttttctgtttttcctcacttccttcaacccatctactcttctcatgtcttctccattggattctaatttcttttccaaaactggccttgaactcttgtcgggagacgtattcgatgagaccct

SEQ ID NO: 21865 - DNA, 509 bp, Glycine max
  Clone ID: jC-gmro02800035h10d1
agccaaaaagagattatcaaacttcatctaaaatatcaattgcgacggataaaggctaaccttgaacatcgtcgcaatctcgctagactacaactcgaaatcataaaattccaaacggggtaattgaactgagtgacagtatattcggatactgtaggatagaataacctgaagtcctgaactacaacaacgcttgacctttgtaagaaagagagaaaaataacacgacataattaatcaacctgatgcagctatttgctgcctttattattacattctaaacattcaccccattagaagacatcaggtgggaagcgcccaggaaaggggttgctctgttgagcctgcttcaaatgcattgccaaagcatagttattcacctcgagggttctaatctgctcctggtattgagacaccaattgctttaaatgcttgaactcttggttcttaacctcataatcagcacatcgcttatgctggattctaaaagcatctttgaaagaaatttt

SEQ ID NO: 21866 - DNA, 406 bp, Glycine max
  Clone ID: jC-gmro02800035h11d1
aaacaataacacatcttcttttttagagtgaacaacaaatacagctttagttctcaattaattaataacttttccagactcttcatgatggaaggatggatgttgcgtgtgtcgtgctagtagtatactttctttcttttactgatcgacaagtttgctgcctttgacatccacaacaaacctgtatctcacgtcattcttctccaacctttcaaaggctttgttaatgtaatccatgtttaccatttcaatcatcgaactcagacccttctctttccagaactccaacatctgctctgtctccttcatgctcccaatgaagcttcccgttattgacttcctccctagcatgaccatggggctaacataatgaagaagggtgttgatgacccccatcaagatcaac

SEQ ID NO: 21867 - DNA, 423 bp, Glycine max
  Clone ID: jC-gmro02800035h12d1
ctgcaaatgatcaagctgttgtgataatctatccgcatctaatcaagataccttttaagagtcacactacaaatgaaaataggaaattgaagcaaattactagtcacaacaaattccaccaagtcagtgagcaaagaatttaaaatattaactttaaaataagacatctgcagttgggagatacagagggacaaatacatgctcccacttataatgtcatcagaataacattagcacccagatgagtgctattgcagaaacctgtgcacctctttctacagatactgattcttttcatgaaccacagtaagccgacttttgcgcaggttgaccaccactggttgcctggtcaggttgggaaaatcttgatagtctgaggctcagcttttgaatctgggtctgcaagcctttgcttaatatctc

SEQ ID NO: 21868 - DNA, 239 bp, Glycine max
  Clone ID: jC-gmro02800036a02d1
attaactgatttggcctttgcgaatacttgatcctaggaccctgcattaacctatttgggataaacatatacgtagtctcatacgacatgcaaaacaaacatgaataactcaacaagacacaaggagcaaagccaaaagtcctcacaaaaatctagattgaagccgattgacttgaatagcggggcactaagaaagataaaagggggatactacgaggacggacacaatgaacaaaaag

SEQ ID NO: 21869 - DNA, 483 bp, Glycine max
  Clone ID: jC-gmro02800036a03d1
aatcaaatggaacgcacataccatcaatatctctaatacaaagccattagcattaccaacatgcaatgtgttataacttgaaaaatgtttgagccaatatctgccatctaatgccaaaagcaccacaaatgaataagataggcataatcaaagtgcaataagcatggaatagcaaactaggcggtgtctgacgcaggttgggttacaccagacttcaccaacatcttatttagggcctctggggagcaaacttcatacttgactttttcagagggtgaaaggaaaacctctgcaagttcaagcttttccgagggtagacttgtgctgccatggtttacttaaaaccttaatgcaagtgcactgcttcttcttttgtgataaaatccttgtaatcctggtttagtattgattgcgctggcctgatatttgccccaatggcttcagcttttcaagcaccgtattttcactatggtcactcatgta

SEQ ID NO: 21870 - DNA, 385 bp, Glycine max
  Clone ID: jC-gmro02800036a05d1
agattaatatgaccatttctgttgaagagaatattcaaaattggcaactattacaacgcttataattatataacccaaaggcctctacatttgcaagaatgcgatcaaatttccttcatgctatggcaccatgttacaacagaggacaccaatttaataaatataaataaaggatatcaaaattaatacccaacaggaaaaaagaagaatacgtagatattcctaactaacatgatacatatgactcataggggaagcacagttacacaggaatttcgagtagccaaaaaacccaagaatttgggaatctcatcccaggcttaaacaatagcatactcgagcttttcctgctccttatgtcgccactaggacttctccacacata

SEQ ID NO: 21871 - DNA, 334 bp, Glycine max
  Clone ID: jC-gmro02800036a06d1
gacccacgagaccattgctattgagctaaatatccattgttcactgccattactccacttttaattatggagccaaatgcattgcccaatagggcatttgcgacgctactaacatgatgcgcaggatacataatactactgaagctactacatctagctgccctcagcatgagcctcggcctcctccagagggggcatttcagcataagcctcacctgcatcctagtcacaggtcagaccaagcttcaacattctgcggatccagtcagcaaaagagaagggcccgacaaggctgaaacctgaagagagaagagcaggctcaaacagcaacaga

SEQ ID NO: 21872 - DNA, 326 bp, Glycine max
  unsure at all n locations
  Clone ID: jC-gmro02800036a09d1
aaaatgggaaatttcaaaggtttcataatatcagatttcatctgttataggaacatcatctgtaacccccaactacaccaagaggacaaagaacttcacaacaccaaccccaaaacaaccctaccccaccgaccactctttctcacttcctaccccctctctaggccgtagcctttttggccggagactttacactcttcggtttcacactcttcactggcgttttcttcgctgccaccgcaactttcttcgccgagggcttagcagcaggagctgctttcttccctggngaagtcctcgtcgacgtccttgaagccttgacgggc

SEQ ID NO: 21873 - DNA, 296 bp, Glycine max
  Clone ID: jC-gmro02800036a11d1
cgatctaaattcctttttcataaattatgccgcaaaaagttatttgaagagcatcaacataatgctctgacacactaataggcaaataatctagaaatgtcttgaatttacattatgcttgtatatcattttcgtcatcttcgtcatagtcagaatcctgatagagctgaatactgttctgaaaggctccgataatcttaataactatgtacattaggataataattccgctagcctttaatataattacagttagtagtgtaaattgggaatcttccgttccatatgtgagcact

SEQ ID NO: 21874 - DNA, 164 bp, Glycine max
  Clone ID: jC-gmro02800036b03d1
atccactgtttttacatcggacgtctccgctttttgggaaaaagccttgggcgcataaaagttcgacactagcgggcaagccgaaaacatggacttcgctttctcactgagtgtaattggaatccacacccaatatcccagtttttttgcccccggattgcccc

SEQ ID NO: 21875 - DNA, 368 bp, Glycine max
  Clone ID: jC-gmro02800036b06d1
caaacatatagcatgactgcaaatattatttaatacgactgaaaaacatcttattttacaacttccaactgaacaaaacttttcttccacaaaatttagcagaaacatactacatacacaagtaataataatactataatatcattgagtgagtgtgtgacagatagagagatataccttctattttctaaggcaatattacaaaatcactcctgtacatttacttgagcactggctgcttccatcagtccattgcgtatctgctcaccaatatccctaacgtggccaggaccatggggtataaaaacagaggtattctttgatgagttcccaaggtctttgattgcgtcaaatgactgagtaatcat

SEQ ID NO: 21876 - DNA, 89 bp, Glycine max
  Clone ID: jC-gmro02800036b09d1
gaatgatagaggtacaatcgacgtgcttagggttcaacaccctgcaatgacattacgtgaaaccttacactgttaaaagggtccattat

SEQ ID NO: 21877 - DNA, 495 bp, Glycine max
  unsure at all n locations
  Clone ID: jC-gmro02800036b10d1
gaaaataatattttaataattaaattatattaaggaaaaagtagacacagaacgaacactttacaaaacagctaaacgaaaactccaaattccaaaagcctattttggcttcaacatatttatccttttattttccaatttccatttttcatcatcgtcatcatcatccatattattatttatttattatcatttcgtcctagtattggtcacctgaaaaacctccccggaatcacgttcagaaaaccattatatcagtagggccaaccaccgaaacacccaaacacagccttagataaaaaaaacactgagaccccaccctgcgaacgttagacctttgaccaacacaaaacgacgcccacaccccatggtactatagtcgtgcaatcacccaccttccctgtccttaatttcatcaccgacttatattnntttttcactccctcgtcgagttntcactatcactactactgtgcagcatcttaatgaacaaac

SEQ ID NO: 21878 - DNA, 443 bp, Glycine max
  Clone ID: jC-gmro02800036c01d1
ctgccaaaaaacatgttgattaaggaaaatgttgaaaagctccctacaagtgggacacccccactttacaaaattggggggtaacccaataggggggggcttacctgcccggggtctaaaatggaccaaggtccattctacataccccttaataagccaggcctaaaaaaaagggttaaaaaagcttttcgaatccaatgcggataagtgaaaatggggttacttggaccatagtccccaattcaccatccttaaagaacatttatttctttattatatcgaagggcaaattttttgccattgcattttgcaaaatcattggctaaaagcttctgggccccaacaaatcacatccttgaaatctgaagaggtttaagagtttaaagctttttatgcctaacagaaccttaagatagcttttttgggtggccaaatttctttaa

SEQ ID NO: 21879 - DNA, 323 bp, Glycine max
  Clone ID: jC-gmro02800036c02d1
atcgaaaaatataatttctttattaactgaaatggccaaaacgaaaacaagatcctaggattctttttttttttttttgggatttacatatagctagtatcatttgacatgaaattcaaacattaataactcaacaagacacaagttgttcaacaaatttccttaaattagactattttgaatcatagagactttcatagcgggctttgaaaaaggtaaaaagtgggtctataggaagaaggacttcttgcacaaaaaggtgcgtaaaggattcttggcttcatttgaagagtctaggaaatgtctccctggtgaataactgc

SEQ ID NO: 21880 - DNA, 248 bp, Glycine max
  Clone ID: jC-gmro02800036c03d1
gtccagaccacaggtatcaagacaagagtaacaaacaagtaatccatttatgggaatatcctcaatcagtaaaaataattcaattaacagaccatataagtctgacgaaagacgggaagataagcgagatcctcggacttgctcgaggcccgaatcaactgaaaagcccggctgcagctctggtgatgggcctgcggattatcgatgaggcgactgatcttattgaaaacctcttcggcagctatttg

SEQ ID NO: 21881 - DNA, 308 bp, Glycine max
  Clone ID: jC-gmro02800036c04d1
aaaataaacatcaccaataattctacattagtgttgagacttcaattatttaacctattcctgagctacatgatagcaagctttgaaaattttcatgtaaatgtaaatgggggaagataccaatttcaatggtacaaaatggaaactgaaattttgaacataaaaataaaagaccgaagagcctccttcttggaaaacttttcagccaatcttgagaaatatctgaatctcctccccatcctcccccgcctttgaaaggaaaatatcatcgtaaaagatgggggaatgtaccaattagcaagaatcct

SEQ ID NO: 21882 - DNA, 341 bp, Glycine max
  Clone ID: jC-gmro02800036c05d1
gtattctatattattcttcattaaaattttgagattattacaaattaatgagtcatggaaatcaataaccccacaaagtattcatcataatgatttattacaaacagtaccgctaacgcatatttctcaaagcctaaacacgtgctaccaagggaaaagctcctaaaaactcccgcgaaatccagataaatccaaatcaattaaggtttcaccaaaaacactccatgtccttaattccagattcccggggaaattcgcagtaccatacttgggaggctgagtgacgacataagcagggccaccaaaatagcacgtgccggatgcacgtgccatcttctgat

SEQ ID NO: 21883 - DNA, 338 bp, Glycine max
  Clone ID: jC-gmro02800036c11d1
caccgttaaaattttaatataacataattaaacgcagccatgaatgacccatgagccacaccaatcaattggcaaacatattcacaatcacgccaacatagcatctacatcacccacgagcacaacaacacgcagcacatgtacctgaatcatcatcgacaacaactcctcgatgtccatttcggttcattactgcattcgcctttgcaacaattcccctttctgggtaaaagacgacacaccccagaggccaaaacataacaaagaagcaagcagataactaaaatatctcagtgctgaaacacgaattcacaaatacaactacaaaggaacgacaa

SEQ ID NO: 21884 - DNA, 329 bp, Glycine max
  unsure at all n locations
  Clone ID: jC-gmro02800036c12d1
atggccagccctttttttttttttttttacttggatggcattgttatccttacatgtctattcacatttaattgaatatcatttgaaaaactatttacaactaaaaaaatttaaagaacaatatatcaagagactttcatctccatctataaaggatcaattgttcatgcaccggcacctttagtgcacgtcatgatattcttattcttattacaatgtacaattctgagtattcatagctttacaccaagtacggatttatctgaactcatactcaatgagcgtagaatgggccgnggtctatctttgtgactaatttcattgtcatt

SEQ ID NO: 21885 - DNA, 265 bp, Glycine max
  Clone ID: jC-gmro02800036d02d1
ggtacaaaattctgataaaatttccattgctttaaaacggttacattgcataaccaaaaaataaattgtgagtaaaaggagaaaaggaaaaaaaagtacagtttaagtattgatgagatgacattagacctatgaatgaatgacactgggtcatggaacacgcaaattattcatccacaccttgcaagacatccattgaagggagtgattaactttaccacaatcttaaccttgaggcttctaagacttgactggcttcacaact

SEQ ID NO: 21886 - DNA, 288 bp, Glycine max
  Clone ID: jC-gmro02800036d09d1
actaggaaactgttatataaaattgagcaatttagataacagactgtctactgaaaacagctcatacacataaagcccataaaaaaataaaaaataaaaatccaccatataaaccagattgtctagcaaactcatctacacactagtaataatactgagtaatcttagctaacgagaataacccttccaattttccctcctattgttcctgaatgcacagcaccctatggagtagacaataatgaggaagacaaggaatacgatgttaacaacagccaccctcttcca

SEQ ID NO: 21887 - DNA, 483 bp, Glycine max
  Clone ID: jC-gmro02800036e01d1
caaaacaggctaaaatattctactaaaatatgtcaacgagcattttacaaactggtcataccgttttaccttaaaaatataaccagggcaaataagttacaataggcgagagttgaaacataaaggcagggcagtccaataagcctttcaaaactataagcgtcttccaaacattaaaaaaaatatcagattcctatactttctaagccccctctgctagagtcctctttgaggtactgatgtatagaacattattccctcggatgaaagcgtcaccatacttgttcttcagttgtccattgacgtactcctctgtctgctccattgcaatattcatatagccatctagacaagcaagtttacctctgtaatcaacaccagaattgagcttgacgacaaccggccttccaacaatggatttgaggaaatcggcgggggttttggtggttcctgatccttgcttctctgttcccctcattttta

SEQ ID NO: 21888 - DNA, 453 bp, Glycine max
  Clone ID: jC-gmro02800036e03d1
gcaatgtaaagcttttaacattacaatgtatgtgttgaaaaatcatacatgcaattttacaattttgctttgcttgcacacaaatctcaaaccctgtacctacttgccaagccaggcaacctatcattttttacaagtaaccgggccattcattctggttctggacaaataaaaaagacatttcaattgaaacaaacatacaaacaataactaaccaagtaaccaaccaatcacatcatgaattgcattagtttgaaccaagcaaaaccaccaccaccaccaccacatccctgtctctctttctttgcctctttcgcacaagacgcaaacgacgtcgttacgctaccttccactgtcgtggcagcctttctcggacacagaaaaaagttcctagatccaagctctagcagcttatccttcctatccaaactttctaggctaaattgggataat

SEQ ID NO: 21889 - DNA, 301 bp, Glycine max
  Clone ID: jC-gmro02800036e10d1
aataataaagaatgctataaggtaaaacagttaagtctagtgacataatggagaggaagaatgtacaagaatcatctcctattttctcttgaggaaaggaaaaataagctgaaaaaaaattcatattctgttaacaaaatgtcaagggatgctgctgctgcatacttttcttcttcacatgccatctttggaaggaagatcattgtatgtttgagtgagtgttaagtttccttctcgctcattcgactcgataagcatcaacacgacttcgcgcattgaaggcctcttggtaggagagaca

SEQ ID NO: 21890 - DNA, 206 bp, Glycine max
  Clone ID: jC-gmro02800036e11d1
agcagctattaaggggatgaggaaatagtgctgcgaatggaaattgatacagtagctttactttttccttttttcttttttaactctgcaagaattcccaaagacccatctgcaatgcctgtttttagctcataccaaattgcatttagctttctttaactctggatagagctaaagcagtagccttttgccagtaaaatgattcc

SEQ ID NO: 21891 - DNA, 277 bp, Glycine max
  Clone ID: jC-gmro02800036e12d1
acttatactttttaatttaagaatttattttattggatccctatttgttcactgttattcacagcttcaaatttactatggcacctgaactacattgtactgttcagtgaaactaagattatatattttgcaaacacccatataattattgcttcgttccgtttgcgatgacttcaaagcatatagcatgaaactgtgaataataacatcactctgatagattaaattaactatatatgcctcagaggaagatcattcctttggtgagataacccta

SEQ ID NO: 21892 - DNA, 540 bp, Glycine max
  Clone ID: jC-gmro02800036f01d1
gatccgtaaaaaccactatctcgatgtcattattggtaggacgaaaaccgaaaaacaaggggaccttccaacaatccatgcatcaagttcgaattataatttacataattattacaagcggtgaataatagataaaggtacagttaaaaatgcaaaaagccatgaagctcgagacatcaaacggggaacaaagatgaaacttgaagggacaggacacacaagtgaatagaacaagaagtcatatttttcaagttgaagctcaagggtaggtttcagaggctgggacagccgcatatgaaccaatgaagacgtctccataaatcaagccagccaaacctactccaatcaatgggaaaacccaatagatccagttagcagcgaagtctccactgaccacagctgggccgaatgagcgagctgggttcattgaaccgtcactgaatgggcctgctgctaaatgttggcacccacaacgaacccaatagcaatgggtgcaatgattcccaatgaccccttttttgggtctgctgcagttgcata

SEQ ID NO: 21893 - DNA, 345 bp, Glycine max
  Clone ID: jC-gmro02800036f02d1
gttgatcaaacaagatataaaggattagatacacaaatacttggactgaattacagcatgcatatatagactagctcagaatcagatctcataatcatacaaataaaacccaaagcatatagggcaaattgagtagctaggccccgggttcctaaaaccaccctcggttagccacacaccatacaattaaaagtaaacacaagacaattgattaatctattaatcggtccactgaaaaggaaacaagcaatagcgaaagaaagagagaaaataacactggaaagagagaatggaatcggcgttacttggcgaccattctggcgatgaaatcctcgaaacggatct

SEQ ID NO: 21894 - DNA, 274 bp, Glycine max
  Clone ID: jC-gmro02800036f03d1
aacaaaatcaaatgctaaattcaaatgaattcatatcactataaacaatttttcaaaaaatggatacatggcaaatttggaagtgtttttacacgtgggagaacaggattctgtgaaaatcaagattcttggggttaagctgtgtcaatttgtgtgacctactgacaccataatgtactatagcattactgggtattggttaatggatagctcttgtttgacaatggcgtgacatccaatatggcttcttggatccacaatgaagtgctcatga

SEQ ID NO: 21895 - DNA, 398 bp, Glycine max
  Clone ID: jC-gmro02800036f05d1
gcacttcaacaattacttaattaaaactttgggtggagcagctacaaaaaagcgggagctttttaagtgcattccaaattcaaacaggtgccgagattgaatagatcttaaaaccaatggaaaacaccgcctggtacaagctttcatatttatggcagaaatggggatcaaaatagaacccaaacagatgagcatagactatcagagaaacaaaatttgagaacttattaaaaaaaaaaaaaaaactctaacaatctcttcaggggggcttatccggtttagcagcagttgcagcagcttgccccctaagacgaccaggcctcctagcagcaatgagaccaaccttttggccaggaggagcatcacgcctgacgggactggcatgaccaataggctgg

SEQ ID NO: 21896 - DNA, 357 bp, Glycine max
  unsure at all n locations
  Clone ID: jC-gmro02800036f07d1
cccttatcatatccatttgttattatcgttattatcccacaagtgtccaagaaaagtcttggcggcatccaagcttggaaaatacgtcggttcaaggaaaatctgagtcaacgtgtcatccgagtcgcaactcaacccaactcggttaccgttagcctcggagcttcccatcaccaccgccaacacctgcttatacgcgtagaagaatctcttcatcgccgcctcaatcgcctgcatcgcctgcaacaagagaaccttctcgaacgcgctcttcgaaacgtagagcttcatcgccgcctcttgaatcctcggtcctcccttcggatccacctncacctncaatatctccggcacctt

SEQ ID NO: 21897 - DNA, 263 bp, Glycine max
  Clone ID: jC-gmro02800036f09d1
ccccccctctagtagtcagtggagggaagctgctcgagggtgaggctgataatgacaacctcgtaaacaaggccagcgattccaccaccgatgagaggcccggcccagaagatccagaggttggtccaggtccagctcacgacagcaggcccaaatgtcacagcggggttcatggccgctccagagaaggccccacccaacaaaatgttagcgccgacaatgaaaccaaaggcgatgggtgcaataattcccaaattaccctt

SEQ ID NO: 21898 - DNA, 335 bp, Glycine max
  Clone ID: jC-gmro02800036f12d1
aagtaaatcatacaaaaacagaactgatatttgacattcgatcagaagcaacacaagatccatatctctataaaaactcacaattacatacaccacacaaaacacaaaattaaccattaaccaaccacatagaactgttagttctttttttttttcccctcaaaggataaaacgattacaaaatacaaaaactttcttcccaactccccctagagttgagcagcatacggattaataagcgagagagcatagctagtaacctgagcaacattgaccattgtagccctaatgggctccttaatcttcccattcagagccttcccggcgaacccatc

SEQ ID NO: 21899 - DNA, 210 bp, Glycine max
  Clone ID: jC-gmro02800036g02d1
gtatagaaacaaagtgttttcctccaaacccgttttaaaaaaaccaggggggcgggattttaaaaaagattttccccctaggaaaccccatcaaaaaatttttcaacccggtttttttaaggcccctcttatcccgcgaaaatataggggtgctccctgaatcctgaaaggcgcccctttcgtaaaaagcgcaacctccttatttaattg

SEQ ID NO: 21900 - DNA, 282 bp, Glycine max
  Clone ID: jC-gmro02800036g08d1
aggttccagagtactattcttttactttacatttgatcaaaagcaacacaagaaccataactctataaaaacccaccatcacatacaccagcgcaaagcacaaaaccaaccatgaaccaaccgcatcaaactgcatggtccttttttttttcccctgaaaggaaaaaacctaaaccaaaaccaaaaacttcattcccaaccccccccagggtggagcaatacaccgagttatatgcgagagagccctgctaggaccccgagcaacactgaccattttagccc

SEQ ID NO: 21901 - DNA, 332 bp, Glycine max
  Clone ID: jC-gmro02800036g09d1
agggtgaaaaggttacattgattagaaaccagtcaaagccatacccaccaacaacatcagataactaaaatctgtcactgaaatcttcagaaaaatagcagaataaacatctccacaagacatcacagactatattaagattattactaagtagtaatgaaaacacagattaggatgtaagcaataacaagtttgtaacaaagtacaaaatcaaattaagtagtgagaatagggggagaggtagtcagctttgccaccaagaatgcgagccttggagtcgggaaagaattcaaatcctggcagctaggagacatctccttcactggcaaccc

SEQ ID NO: 21902 - DNA, 383 bp, Glycine max
  Clone ID: jC-gmro02800036g10d1
acaccagatacaaatttttcaagacgtatgatattgcaaaagacttaaacttctacacaagaacgaacaaaatgctataatgaattcccacactgccacacagtgcaaagctattgcataccaataatttcaagaacccttattaacttacactttcaaagggattaggctcaacaatattatatgctaataaatataataatcttaagatgatgaagcaggtttggaagatgggttgaaaggaacctggtcagcgcatgtaaggatgtcaaggggcccagcctgttctcgaccaacaccaagaaggtcaagataatacacggaatgggaaacaatattggtcattgagtccacatcaccttgtccacaaacaccatccccat

SEQ ID NO: 21903 - DNA, 376 bp, Glycine max
  Clone ID: jC-gmro02800036g12d1
acataattaggaatatatttctatcatctaacataaatctacaatcttctgtactataacaagctcaaaagaatcacgtataattgaacaatgaatgccacagcatccaaaccagacagacacacgcatgaatgttacaacagcacgattaagtccactgagtttctgaggagaggtcaatatatgaatcaaatcgtgtctagggactcagtagccactattaccgcatcaagaggatcatcaacagtgttagaagcaaggaagcagccaatgaaaaaccattcctgaaaccactactgctcggatacactgagggtagagaacattcttcgccattgaaaaagacctcatggggaaacccatctacacgagctac

SEQ ID NO: 21904 - DNA, 288 bp, Glycine max
  Clone ID: jC-gmro02800036h03d1
aatataaggattgatagtttatagtagatgatgtgattcaaaaaaaaaaaaagattgccttaggtagcaaacgaagacaaatgggagatgatacaatgtgcatggaagggcttatatacttcataaaaagtagatgaatgagaccttattgaaatgatgattatcaacacacaaaaagtaaatattacatatgatgatgatgacgatgatcttaattaagaaaggagtttagatgcaacgccgatccttgcaagtggaacacagacaagactatgtgcccttggaaca

SEQ ID NO: 21905 - DNA, 332 bp, Glycine max
  Clone ID: jC-gmro02800036h04d1
agatgcaacttttagtggaacctgccaaatttttatctactaaatctctaaatatagctagattattatgaatatcaatctagccgagagcgttgggggagggggcgttagggatctttagcacaaacgaaagtagagattgacatatacaacatttaattaactaatgctacaaaattacataagaaatatctagtatgttatttcactagatatttcaccatgtaaggtccttcaagctcatatcccagtttcctgtaataatggcgtgtgccaacccctgaaattacagctattttagttgatctgagttctctgcaagcaatgcgctc

SEQ ID NO: 21906 - DNA, 438 bp, Glycine max
  Clone ID: jC-gmro02800036h05d1
ggcactcaaacgcaagagtcgtataaatcacaaatcataataaaacacactaggaacaagcaaagcttgttaaaaggtgcaatagaatttatgccacaacttggaaaatagagagttagggaccataactacccaagttgaccatcccacaaactaggatattttccatgagtaactaaggcttaaagagagctgctcccaccagaaagcctactattttctataatcattttagttggcccggcttttgaacacatcaagacccatctcagtaagatcagttgcttgcagctctacttgaattccatccagctccctcttgaatctgtctttggagctctgatagatcatcttgctcctcacccttgatgagtcaagggaccatgcaatgaaaaaaattctgcttttatggacattcccttcagtcagatactcaaa

SEQ ID NO: 21907 - DNA, 369 bp, Glycine max
  unsure at all n locations
  Clone ID: jC-gmro02800036h07d1
aaaattccatcaaagaaatatcttgtcccatgacacatgaaacctactcgtctttaaatattggtattcaacacctctagtacttaattttaaattatcaaatgtccataggagaaccaccttggtctacagcagcagcaccaccaccaccttgatctgcagcaccagcagcagcacctggatctgagggagcatcctgtccggctgctggctgagcttcttcttcagctggagcagcttcttcctccctcacaatctcaaaagtatcaatcaactggtgaacagnttcctgatccaaaatgaggaatggctcaccaacaccaaccacagcaattgtgcacacagaactccagagtctttcaccttgca

SEQ ID NO: 21908 - DNA, 362 bp, Glycine max
  Clone ID: jC-gmro02800036h08d1
gttaacattattatattattaacttaattattacaaagtgacgtggaatacataatgtagcttatactagatgattatgataacgaaacagaatagtcaatcgtcccttacgagaggaaaaacctataaggccgtctaccaactcaacatattgcactgtttttcaatgatatctctcacagcaacacaaagagtttattccgaattcacactaaaataaactcgattaagataaaaatttggaacggcgtatcgatgatatccaagctcagactcaattctttaagccacggatgcaatgtggacaatcaaatcaatcacacgggaactggaaccccattcgttgtcataccaggaaacaa

SEQ ID NO: 21909 - DNA, 310 bp, Glycine max
  unsure at all n locations
  Clone ID: jC-gmro02800036h10d1
ttatatgcattgctanatgaggaacatgctggaattatttcccgggtcgattgatgctactattcgtgttcctgccctttttttttttttttattattcttgtttttgcttcctccataggcacatatatttaaccgaagtgttgaaggtataatgatttcagttcacattgataatggtacagagagtattaaatatatatatatatatatatatatatatatatatatatatatatatatataaaactaagcataattactgcaaatacacatttataatcgtcaccctttgatataacttctttgta

SEQ ID NO: 21910 - DNA, 255 bp, Glycine max
  Clone ID: jC-gmro02800036h12d1
attgagttctgttttggttattacatacgacttcactgcatagaacacttcatcttaacaaatagatctaaaggctgtaccggatgccccaaacttcatagagtccccctttccattatgcacacccccatacaacatttaaaactcatacatgaaaatttcatagacaaaaactccattattggtatgacattaagcacaaaagcacaacaacaaacaaaggagcaaaaaactaaaaagcatccaaaggccttc

SEQ ID NO: 21911 - DNA, 502 bp, Glycine max
  Clone ID: jC-gmro02800037a12d1
ctgggggcaattggaaaaaaaataaaataaaattgaggagggaataatcttgaatatttcgaaacaacctgaagaaacatattggttgacaatttgacactagagatagtagtagctgataagctttcacctgccctaaggtcaacactcagcatacaccataaagaggcatgcatacatgcatgcatgcttcttttggtctccagttgtccatgaacaaaatggctagacacaagtgacatctatacttggggaatgagaaatgacaaaaaagaaagggtgacaaagaaaatgaaaactcatcatcatcggcaactctatgccttgccattgggttttggtgatggttgcggaaactgatggtgatatggagatgcatgcgtgccatgtggaattgataggcttccttgttggtgcccatttctggtgagcaatgctccttgtgttctcccggttctggtatttggacttgcgctaaaccgggcggtttgcattgtctgaa

SEQ ID NO: 21912 - DNA, 383 bp, Glycine max
  Clone ID: jC-gmro02800037g12d1
aaagttgactaaacaacaaattattgtctttaaatcctttataaagatatacaccataatctggtagttgaaccgttacagtgagacctaaaatttccaaaattgaactacaaaagctttttccacaacataaaatatgatatatgttcttactcatgtgcacagattcccaattaattgttattaaacaaagatgcttgtttatggaaataataacaatgtgaagaatgaaaaccaccctcaataatgatggcaatttatagctagtaacgcgtgaactgaatgaactatactcagaaacatgcctgccctattagaacaagtggataagaaagggatccataaaaaatatttttaacaacccattgatttgatgcttgaaa

SEQ ID NO: 21913 - DNA, 552 bp, Glycine max
  Clone ID: jC-gmro02800038a10d1
gaaagtcaaaagtatcaagcatgtaacttcttaacattcaccaccaagaagctggcaacatagacacaaaggagtaaattcagcccatagtaaaacgcagcctccatgttcatcatttcatttccctatacaaattctgttagacatgacaaccttagcagaacatatagtaccagttccaggagaacactttctggaccccttataccctcctatgaagatttctttgcctatcatcacagctgaagcagtggtaatgccattacaaccccaaagatggagaagagtaatagcatcatccacgttggaaatggttttctgtttttcctcacttccttcaacccatctactcttctcatgtcttctccattggattctaatttcttttccaaaactggccttgaactcttgtcgggagacgtatccgatgagaccctctctggagcagcctgctcagaaagctgttgctggttgtactttttaacatactcagggaacatcttcctgaatgtagcattcttacagttgaaagaaagggaagaatttgttaga

SEQ ID NO: 21914 - DNA, 434 bp, Glycine max
  Clone ID: jC-gmro02800038a12d1
ggtgaattctaaaaataattttttacaaaataaggggttgttatcccgagctaatacaaggggcaaaccattttttgattccccctttgcccccaacatggtttttcctatttaacccctttattaaagacctttcatttttggattaggaaattttttggtaacctatctagagggggctcaccataccattccttgaaaattttttgggggctagaggaccccaattaaaaaaattccccttgacaaagttacaatggtttcgaatttcttcttgggaccccggtagcccttcaaagggggctcatttttatcattggccccttaaaatgttcataaaaaaaagttttgttaccacccaaacttttggcaatgggcttgggttttgcaccccttggtaaaaataaaacttggtcccttccgaagcagccctt

SEQ ID NO: 21915 - DNA, 505 bp, Glycine max
  Clone ID: jC-gmro02800038b01d1
gacaattaatcatttcatatttcacacattcataacaaacgtaggtgggatattagagtactattattaatgggacacaattgagttcaacacaaaccgaacttattttcaagggacattattacagacccattaaacatcaaagttcttcaaatgttttgggaacacattcaacattacacaacgagcttaaaaccccccacggagacggaggacaaggtgaagggttgattccttctggatgttgtagtcagcgagggtccttccatcctcgagctgcttgccagcaaaaatcagcctctgctggtccggagggatgccttccttgtcctgaatcttggccttcacattgtcaatggtgtcagagctcttcacctcgagggttatagtcttacccgtaagagtcttcacgaaaatctgcataccaccacgaagacgcaacacctagtggagagttgactccttctggatgttgtagtaacaagggtgcgtccgtcctctagct

SEQ ID NO: 21916 - DNA, 460 bp, Glycine max
  Clone ID: jC-gmro02800038b07d1
aaaatagttaatgataagctcatgggataaaacaggttgagtaacattagaaaagaaaacaaaatcctgcaaaatggatagatagaaaaaggctaccaaaacccatacataaaattggcttgtatgataaagagactaatcaacggttcgcatgaagtctttgggagcgaacttgtgacccttctccttaccggtggcggtacgacccttggtcttgcgatcgagaatggccttgcgatccttgtccaaattgagctttgggacaaccaccttggaggggtgaatcccaacgttgacggtggagccattcaccttctcgcgggttatgcgcttgatgtggatgacccacttgcgacggtacacctgcggtacctttcccctaggaaccttgtatgttgcgtgcaccaccttgaccttgatcttcttgcggactgggatcgaccgcacgttgtacttcgac

SEQ ID NO: 21917 - DNA, 529 bp, Glycine max
  Clone ID: jC-gmro02800038c10d1
ggcaaaaacttaaaaatataacttaaacaaaacacctaagactctgcggggataaaactactataaaggagtaaccacgatgatgatcacatgtgctagcaaaattgcccaaatgcaatcacttcttcttggcagcggccttggtgaccttggctccgggggggtctttcttctcaacactcttgatgactccgacagccacagtttgacgcatgtgcctcacagcaaaacgaccaaggggaggatactcagagaaagtttcaaccaccatgggcttgggtggaatcatcttaaccatacctgcattaccattcttcagaaatttgggctccttctcaagctccttaccagatcgccttggaatcttggtcaagatttcagaaaacttgacagcaatgtgagaagtgtggcaatcaagcaccggggcgtattcatttccaatctggccagggtggttcatgataatgacttgagatgtgaagttggcagcttccttgggagggccattcttgaggtggatgcacaaaac

SEQ ID NO: 21918 - DNA, 518 bp, Glycine max
  Clone ID: jC-gmro02800038d04d1
agtgcttcatccttattcattctaatttaccaatcaactacggatattcgagcctattgcttccacaattctatcaacgtaatctctgaccaactacagacagctacgcatttttagttggaacaaatgtaaaagcagatttaggagtacaaatttgagagttacattaatactggacaattgactcctagttacacaaatcacttattataatactagtgatttgcattgaatagcaacaaacatgtctcgaaacatcgttgtatcaagactcacttctctacaatctggccacaatcttctattactaccggttcagatgtcctgccacttcctgaacccactttctccatttcctgcacaacgctgtatccatcaacaacttttccaaacacaacatgtttcccatcaagccatggtgtctttgtagtacatatgaagaactgagaaccattagtatgagcttccgcatttgccatggagagaaaaccaggaccggtatgcctcaaattgaaatc

SEQ ID NO: 21919 - DNA, 526 bp, Glycine max
  Clone ID: jC-gmro02800038d07d1
acaaaagaatgttctaattttattattcaatatcttatttggcaattaaagtatggaattgggggttacaaattcaggatctaaccctgtgcagactattatcatatatctgttgaaagggccaatacattttttacatacaaagactcttcaacaaacaatgaccagtgacttacttcaataccatgtaataataataaacaagcaaaagaatcatcattatctcaagcagcaaaacggtatacaccattaccaaaacacaaccctttcagtttacagaaaagaagtgccagccaaaccatgatgcataagattatgcgcgatcgcgtccctcgtctcatggagctcattgacctcaaggcaacctcaggcaccatctcatcatccatcagatcaaccttcagctcagggtcaatcttttccccctttaacttgcatatattatgcaggacgcagcacgcccctagcacgactggcaaggtcctgcagtatcaccttggtcctttttctgcagacaaacttcacc

SEQ ID NO: 21920 - DNA, 483 bp, Glycine max
  Clone ID: jC-gmro02800038d08d1
cgtccaagcaacaaaatcattcattcgcaacttgagaagccagcaggcaaaaaactaaaaagtatctaatgcaagcaaaagatttaaaatatcattaaatgaataacatcgaccaaaacaaaatctccacatatcgtaatattgcttccacaagctgctcaacggtttgccttggcaactctctcaatttcatccttttttttgatagcatagctgttggacgacccttttgctgcattaataagttcatcagccaagctttcagcaattgtcttaatatttctgaaagcagcttcgcgtgcaccatttgttagaaaatatattgcctgattcacaccccgaaggggtgaaatatccacagtctgcctgcttacaactccagcagaaccaattcttgttgcatcttcacgaggaccactgttgatgacagtattcaacaataacctgaatggggttttggtcagtcacaaatgaataattctc

SEQ ID NO: 21921 - DNA, 586 bp, Glycine max
  Clone ID: jC-gmro02800038d09d1
accctaaacctttttatttaggggaaaaaacaaaaagtacattcttcaagccactacttcaccaaaattgcacattaccctattataaaaaataaaaattccaaatttgagtgagggcaaacaaaagtgttgttctttgagcgaaagacagaaattcttgttactctccacgcttgtttgaaacatgtcataccaaagctatttggggaatcacaaatagctgaaatgcaattgcacttaaaaggttacatagcacctgcaaatattcatgaccaagcgtggtcccatcaagtgctttacacctggttggactcttgaatatttctcattttgaaggacccagcaaaaatggcacttctacttgaacctgaacaatatgtagggtgttctaaaggagatcaactttccatttaggggggttcctcatgccccagatccccccaccttccccctggatccaaggggaggaccgcccataaaaccaggcttttatttgatcaaaccccccccggcctttaatttcccctttttttcctaaaaatctatgggtgtaacttgttcccaccccccggaccattccccccaa

SEQ ID NO: 21922 - DNA, 500 bp, Glycine max
  Clone ID: jC-gmro02800038e01d1
agatactgaaaaaggatgtcatacattcacatagggttttatgttgaaaaaatgaacacaaatgcacccagaatacatgcttccactaacaaataacaacttatgatgagcattggcactcagtttacattcaaacttccatttttatctgcattcatcaaatgatccacaatatgattaatgtgcttatcagagctgccttcttcaccaactggttccctagccaacttcttccatttattggcattccttctaatctcttggcttttttgacccttcatcacattcttcaaactttggacaaatttttgctttctcacaattcctttctcatccttcttaggccacacaccaacctcccagatttcatccaaaaatttagcatcaggcaactggtcagcccactgtggcaaacacaccatcggaacgccgaggcttagactttcgagggtggaattccagccacaatgagtcacatagcattctagtggtttggtgag

SEQ ID NO: 21923 - DNA, 476 bp, Glycine max
  Clone ID: jC-gmro02800038e02d1
atctgaaattaattaattcccaaagaatatggtactggacaatgacacagcttacagctatacgagtgacatacaatcatcacaacctcagttaaaaacctccgagagaggagagtcacttgagctgtacaagctagaagctcagaaacaagccagtatcataaatgactttccaagatcatctctctctcttgcaatttccaggtaaaagaaatttatacttgtcagaattttccagaagaaaagcaggaagatgaactgcagaataggaatggggtattggtcccattttaccaatgatatccctgaaagtgttctcctccggcagcatattaaataaatcggtccctttggagattaccttctgaattctttcaggatttaaatagtgagagaacctgactctatcataatggctgtaggctttcatcttgaaaatgaaatcgctgatttcgggggaagcaaaagttacaatg

SEQ ID NO: 21924 - DNA, 497 bp, Glycine max
  Clone ID: jC-gmro02800038e10d1
acttcaaaactctaaaatatatcatatatcaggttacattctgctcaaaaccatcaaatgataacaatagaaaattttctccgaccactgaagcaaacaactagaagagaatataatatccctacacaaaactgaaatttcaaaaataaacagcaaatggaatttaagtttgcaacataaaactgaacaaacaagccccaaaaacttggaattttcttttaagctcgggcaggagctcctactccagcaggacgtggggcttgaccaggctgaccaggccttggtgcatcatccctgcgcctgatgaatcgctgtggaggctcacgctttctcctatcagtgcgggatcgaaccctcacaacatgagagtggatagcacaggaaacacaatactgcatctttacatacagtttcggaagcgtgtattgttcgtaaacacaagcctcctgcacatctttgactgcagcctgttcaacaatgttcctcacccagaaacc

SEQ ID NO: 21925 - DNA, 388 bp, Glycine max
  Clone ID: jC-gmro02800038e12d1
agggaaataaactaaactttttcaaaaaataactgggttaaaacaaaaaacaaattttccctgggggaataaaaaggccttcattttccaacaattgggatagaagcggtctcctccttccccgcaaaataaagtactcttttaacctagtatttctcaggtttttatttccctaacctcagcaattgctgggtttaaaaaaacctgcctttggggaaaaccccctttcccacttttggagttaatccccaaagtaatcttcttttcccccagctttttttggggaaattttccccccaacccaattttccctttccaagggggggggttaaaaaattggttttgtttaaaaactgaccttgagcccaatttccgggtttcccacccc

SEQ ID NO: 21926 - DNA, 583 bp, Glycine max
  Clone ID: jC-gmro02800038f01d1
aaatacaagttgtcattaatattaaacaataattttggcatcataaattcttccggaataattatacaaaagtgaccagggaaaacccgatctgccagttgcccactgaataaaaacacacattatattactatgtgttgtcatacatgcattgtaatgagtggatattccaaagcaattggtccctttatccctccttaatccttatgccgtaaatggcaccatcccttgtaaattgtaattgcttcttcagaaatagaattatacaaaggtagttgcaatatctatttgccaaactataaatgtaaagacccttcttcccaatcctagtagtgtcccaattgtatttacaaaggcgggacaagatatgtatatacaagtacaaccatgtaacataatgtaacaataatcatactttggtctttactagtgcacattacagggagttattatgcactgaaacccctttgcagagaactccagggattggaaggaatactgacacaagcttgtgctgaagcctcagccatttggtcatttcttatccctacattgcagatgtttgcaaaggacctcatgtgtt

SEQ ID NO: 21927 - DNA, 418 bp, Glycine max
  Clone ID: jC-gmro02800038f02d1
gagaaaaaaaatccttacatcaatgggataaataatcatcatgaataacattggcatgagatacaactattcatattacaaagaaaaaggaaaaaaaaatactatgacaaactatcctcacacttctgcaatgccataagaatggcaagatagtagcaatacatttcatatatatatatatatatatatatatattccctttaaatattgccacctcgggaatattgaaaactgccacatatttttgaatcatatatccagctccaaaaatgtcaaggagcaaactttactccgctaaatggctaccgtggatgacaaaggacactataaagaaacatccgacaaatgtgtcaatggttatatagcgaaaccttaaatggctcaagatccgagccaaaaaaatgaggaaaaatcagct

SEQ ID NO: 21928 - DNA, 413 bp, Glycine max
  Clone ID: jC-gmro02800038f05d1
atgaagcacatttataatttataatttcaaataaagggcacggaagaaaatgaaaagggaaagaatccctgtagtctgaatatttaaaacggacttaagttacattctttgcaaaggctacttgggtgaatcaataaattacaggttgcaaatatatttcggtcaaaatacagggacaacccttaatatggagaactgctagaggcaaggatgctgctgcaacattgtcttcctcttcgcggtttaacacaaacaattgttaccaaagaagcaccacacaattctcaaatcttcaatgaagaaactgaaattttttcagcagattgagaggattccttgaaacccgacattttgtttagtgcaacaatataggccttgacactggaaacaacaacatccatttcccggtccag

SEQ ID NO: 21929 - DNA, 554 bp, Glycine max
  Clone ID: jC-gmro02800038f08d1
aattacaaaatttaaatataatttatttaaaataacccacaaacagtggaaaacctacatattaatttgacctgaaaataaaaacaatcccacttctcattagttttgcctacttgaagtttaaatccccactagacagttgttgcatacatttttttctcttgacaatcgattatgggccttaaagggttccatttttgggctcgtcaattttggtatccactgcatcatatgcagcatcatgaataccaagtgcggcacgaccagaaggatcaagattttttgaccatgctgcatcccattccacagcttttgcagtactgcatgccacactaggacctcctggcactgttgcctttgctgcattctttggaaagaacttctcaaaaattgtcctgtagaggtatccttcttttgtgggaggagtgttttcagggtaaataaaattggcagccatcatcgttccatctgcgacttgtttgttggcgtgatccttcaagccatcaatcccggtggaaccaacccccatcactggaattggtccttctgcctgt

SEQ ID NO: 21930 - DNA, 347 bp, Glycine max
  Clone ID: jC-gmro02800038f12d1
ccatgtcgtattcaaaaacattgggcttgaagccaagacttcaaattaaattcttcctggtccactcccaaaaatccttttatagaaactatcgggggtctagctcgaccaaaatcctaaatgaaagagatcctaaccttttgttatttaaatctgaagggaactatgatttcatagtaccacaggtgtcaccattacaaggtggggaccaagtcaccctttcaaggaacaaccgacagaactttcaatacaaccatgtcatttgaccggattgctaggaccactcactgacttacctctagtcctcctctacggcatttgccgccatcaggaatgttttaccatca

SEQ ID NO: 21931 - DNA, 521 bp, Glycine max
  Clone ID: jC-gmro02800038g01d1
aattcaaggatgagttctcaggaaacgaaatttttacataggacatcccacttaacaaagacaaaccaaacactaggcaacggatcaactatttatacaagtaaatcatttagtgatattactaacaaaattttctttggcatcatatatgactttgattttaaaaaatattagccacaaacacatggtcctcccagctaaaaacaaaagttgctaatactggagcacataacagcaacaacattcattcccccttagtagcaccagtccaaccaaggccgggcctgcttacttgaccctgtggttcttcataatctcgtgcatctcggattgaagcttcgaagtcggtagaatcacttgcaacaggaagaaagctactgatatcatccctggcaccaaatcctccagcccgaataacatcatcaggtgttattgatgcctccatgtttacatctccagatgcatcaatttcctcaggacgtgtaccctttgggcaatattctccaccttttcaatcagct

SEQ ID NO: 21932 - DNA, 575 bp, Glycine max
  Clone ID: jC-gmro02800038h03d1
acggcctatattaataataaaaacaaaaaaagagcaataaaaacgaataataacggtgtaacgggggtcagaacaacataactgaaaacaatataaaattagaaaaaaagctataacaaaaagaaggaagaaaggaaagaatctcgggaatggacaaagaagaaaaaagaaagtagggaggaaaacaagatcgagggggggaaaaaaaaagaggggagcaagcggaggataaagggtaaaaaagagcgggaaaaagaaaacatagcatgcagaggaaaaaaaaaagcggaggagaagggaacagaggtggggaaaaaaagaggaaaactgaaaagaaagggaacgggcacctacaaaaaaaccaaggaaagccgaacctgaaaacaaggagggacagggggaccaggaaagaaacaacttaaaaagggggagggacagagcaaaaaggaaaaaaaccaaaatgaaaagaaggcggaaagaaccaaaaggggaaggggaaaaaaagggggaatgggggaacgaaaagggtgggggaaaggtaaggggaaagaaacgggaacgggctgtgaaaaacc

SEQ ID NO: 21933 - DNA, 572 bp, Glycine max
  Clone ID: jC-gmro02800038h12d1
atccagaacttttgaagtctctcaaattccaaactctagcatgtttctcgtacaacatttaattacattgacaggtattaattgaaaagtacattgacagatgagtatggaaaaatatctatgaataacatgagttaacaccaccaactattttctttacaaaagtacattctgaaaggaagaagaaagcttgtgaaatggtagaaaaagtatagcaactccacagtaacaaattccacatgtgaaaactgtgttctagttttttattcaaggttggtcaacttggtccccgctaaactttaaaatccagtgaactgtctcatggtccccccaaccttatttgagatgagataaggtcagaaaactctagtaattcctcatgtttcagagcaattttcaaaacacaaacagtttctgttctgttgattagcctaagttgtgagggaactgaatgaatagagaagcaaatcaaagagagaaacatgattcttatccattacggtttcgtgacttgatatattgatgatatggagaaccctgaggaccctttggacttgacaagatcctcactg

SEQ ID NO: 21934 - DNA, 382 bp, Glycine max
  Clone ID: jC-gmro02800039a01d1
caaaaaaaattgccatatttcaatattctaacatcaaattatcatatctgggcatcaacacaacaacttgggcttaaattattcaaacagctaaacttgctggtccatatcctccaaaattaatttaagactacttaaaacctattttatctacagttctacacttggggtaaggcagacctagaataaactcgaataaccataccaatctttgcttttgctttgctctacaatctcttttctcttctcattattcatatttttccccattccttctttgggttggatttaaaaaccttggatgttactgcaggctgaagaacaagattcacaccccaacaataggggttttatttctcattggatgtttttgtttttgctg

SEQ ID NO: 21935 - DNA, 526 bp, Glycine max
  Clone ID: jC-gmro02800039a03d1
ggagtagaataatttcactttcacattcattacaataaaacgctccaccgtactgcatcgttgccctgagactcttatcacaaatcatttcaactttcaaccacccccgacagtggaccaaagccaaataaatatgactcgttcatttcatcatcccttctagaccagacaaaccgacttttcaagctttcgtcttaattaaaacacagatcatcataatcataatgttacataataaccgcattttccctctcactctctctttttctttctctcgcatacacgaggacggtggagattaaatcaccaagctccggtcccatcgaacggcccagattgaaatcatcaaatcctccgcagcttctccgctttgatcacggggttggcacgtgcaatctcctctctttccactgtcttgaaatcgaacccgcacgcgtgctcctccgggtacctgtgggccccggagaacgtcactccgcacctgcaccttgaacccggcagtcccacgcgcttgcacacgtggcac

SEQ ID NO: 21936 - DNA, 374 bp, Glycine max
  Clone ID: jC-gmro02800039a04d1
aaaaaaaaccccttgggggtttattttaaaattggcccggggtcacccccctaccaagtttccccgatttatttattcccccctttaggggaatttttgccccttggacccctgtgggggaagcccgccttctttttatttggtcaaaaaaaaaagaaaaaccgggggggccccacacatggctaaacttatttttggatccctggggtgaattttagttaatcaacaaggcccccggcaggtttttttttccacaagaccggttattataggggttaaccggcaggcatgccgggttttattttctttcccttccccccatttgatcccggccctggatgggaccccgtgttttaacccgctttaaaaccccc

SEQ ID NO: 21937 - DNA, 515 bp, Glycine max
  Clone ID: jC-gmro02800039a05d1
gaacattgcaaaaacatgaaatacaacttacgagagatcaaaatgtcgtcataacaatataattggctacttcaaaactattgtctcaaaacaattaacattaatcaaaaccagaactataaatatcaaaccagtccctgttccaaatccaacaacacgaaggatgagaccaacaatatcacacagaattcacttgatcttctttttaggcctcaactggttactatgaccgcactttttcttgcggcagttcacagccctaggatgcagacgggcatagcacttgcggtaaatcatcttgtcctggctgtatttgcgagccaaagccatgagggaaggctcaatgatgccaccacaaagcctgtggacgagatgaagggttgattccttctggatgttgctaatcggacagggtccttccattttcaagctgctttccggcgaaaatcaaacgctgttgatccggaggaatgcccttcttgtcttgaatcttggccttgacattgtcgatggtg

SEQ ID NO: 21938 - DNA, 472 bp, Glycine max
  Clone ID: jC-gmro02800039a07d1
cagtaaggaactcaaattacgctggccatggaccaggtggaacagttgcagagtttttaacattaatgcatccaacgttctcaaccagaaagtaaaaaatgtacttccttttgcccttttccccttattaaataacacaacttaaaaacaggggggcagtttggccacagacattgaccgtagttcatctcacagtcggcaacattaaaatggaaggaaggaataacctgatacatttttatacccaaaaaatggaaaattttgttgtttggcattgccaagagttcctaaattattaaatttagcaattacaaaaaaaaaagggattaaaatgagaacagggctgtgtgtgattaagacgctgcagattccttagcaattttctcggcctttgcaatgacctcctcaataccgccaaccatgtaaaacgactgctctggaaggtcattgtttttttcattcaacacaccct

SEQ ID NO: 21939 - DNA, 519 bp, Glycine max
  Clone ID: jC-gmro02800039a09d1
gaacaaaatacgtgaattattgtaaatttttttaacagggttcaattcctacgaataaaaaaaaaaatcgcctgcatgaatatgcaaattaagaccatcccaaacccaaccccgttactatattgatgaattttatgcttgtgccatatgcatgattatacaaaggcaagatcatatcatgcagaacgagtgaaattccagcacctgaattgagttccaaatcagtcattagcctcatccactttccagtttctgttttatttagaatttgagtcaattttaagattcatttgatttccattctactattgccagggtatgccggccaccacaagcaactagtttagctatccaatgtccctcagttgcagtgccactgggatcctgtgggggagggaggtctataggtaccctcattggttgaccagtggtgactttccttccatatccaagacgtccatggtcacctctaccaaaagaaaacatgtgcccgtccccggttaatgcaactgagtgagt

SEQ ID NO: 21940 - DNA, 458 bp, Glycine max
  Clone ID: jC-gmro02800039a11d1
aattaaaattaaaatggaacattttccataaatatattttgaggacagagatgacagctgaagagaataacttaaaagaaaaaaatgacacactaaagggaagaacaccacagaggaatgtgctaaaggctccccctgtcatgaaagagactttaatctacacttatccacaatcttgaagacataattgagagggtcaaagaaacgttgtaaaacacaagccaaaagcattcccaattattattaaacttggcatatcaacctacatctttccaattatcttctttccactagagccatcataaggaagagaaagacaactcatttatgggggttactcctgaatgatccaagagccttagctgcacctgctattaagatgaactgatggtagaaggctgcaatggctgccccaataaatggtcctacccaaaagatccaatggtcatcccatgggt

SEQ ID NO: 21941 - DNA, 494 bp, Glycine max
  Clone ID: jC-gmro02800039b03d1
aactacaagtagtggcgcgtgccttatcgtagctattaggccaaaatgatcttcaacacaagcatacataattaaccattcaagttcacgtggattgttgtgtggtgtgagcacctataggatgtaaacagtgatgatcacaaagagcaaggaaaatttaatcccctaaggtttaatttatgctatattctaaaaatcaaaccattcatagctcctaaaatgagatatttatcaactccacaagctagttaacatacttcattacttactgtcctaagagaagtatgcatatacagctcatcaatctacagattcatgcaataggcctcatggtcctgagcttcagctagaccaggcacattgaagagttcattaacatctgcacctagtatgcatatacaactcgtcaacctactgcctactgattcaggcaattgtttacatgaccatgtgctttattcgaaatctgggaccgggaaaggctcatcatcatc

SEQ ID NO: 21942 - DNA, 431 bp, Glycine max
  Clone ID: jC-gmro02800039b05d1
ccacgcaacccactttatttttttgaaaaaaagatcccttccttaaaggaaaaatacctctgggcttcttattgggggtccccatcaatggtaccccttttcaaaatttcacttgaatcactccacctagggggtttaaggcaaaataattttgctttaggagcaatgtttttttcaccgtctcaaagaggcatattgcccagagctcaccatcccaaaagtcttcaaggctcctttaggccccattggtctcgggaacaaaaaaacgggccttaactagcctttcctgcttaaattcaaaaatcttggtcatcaaatcttggggaattgacccgccaaagatatcaaaattccccttgattctggactcattagggcttttaggaagcacactttgacctggttgcaagccccattgaagggcaacctgg

SEQ ID NO: 21943 - DNA, 455 bp, Glycine max
  Clone ID: jC-gmro02800039b06d1
gaagcagaaaccttgccaacaaggtatttaatttcatagctgatatatataataatcaggaaatagtccagaactgtagcttccaaggaggagaaaagtccaaccataggactataccatttttcaagtagatttatatgactctattcaatttaaaacctattgtctatatggctccatcatattatggagacacgtcttcctaaacttgaccatgatctacagcaacctttcaagggccatgttttcatcaccaccaacagcttccaaaatgctccttacttgagcttctggaaatcccatctcaacgagtttctgtaccttatcttcaatcccacgagacgaagccttggcaaaactttttgtccagtagcgagcaatgttaacaaatgtctgatagttcttcagatactgctgtgccaccacggcattttgaggatcatcaggctgaggag

SEQ ID NO: 21944 - DNA, 512 bp, Glycine max
  Clone ID: jC-gmro02800039b07d1
ggaaaaaaaatgaaactcatctgcattattattcaaaaaaaaaaacatttctttaattgatattttcagaatttaatctatacataagggatccctaattatacctttatgttcaaaccaccatttacaccaggtgtaccatcagatatacccaaacagccaaagcctaacacctacccaggaattcccaccaaaaacaataactacaacctaatataagttaaaaacaaacaaaaattccgaaaccattaatcattcaccataactagttatcgtcgtgtcatcgcaattgaccaccctccgggtccttaataatgtagccgccaccccaatctccgggtcctcccgcgctgacccgacccggacgcgatccgggtcttgacccgttcaaactcggggagtggacacggaatcttgatcccaccggggtgttcaaacccgaactttttttctgctctcctcagcaaatcactgaacaaagggtgggtgaagtaaatcaccggaatcaacac

SEQ ID NO: 21945 - DNA, 316 bp, Glycine max
  Clone ID: jC-gmro02800039b10d1
acgtaataattcatttcataaataatagtttgtcaccctaggtgacaaagctgcatagaaaattaaggaaatgataacatatatgattgcatacatgtagcatgtgcatttttatttttaccaaatacaaagccaaagtgaccaaagcaaaaacaaccacactaatacaagaaaataacatcggattaatgcatgcctttatttcaagagccaagagattggactctaattgattaaaccatatactctaatatattttcaaagagtgcatgcatggtagtacgtagcagcttcactagattaattaatttcccga

SEQ ID NO: 21946 - DNA, 451 bp, Glycine max
  Clone ID: jC-gmro02800039c02d1
cagaaaatccttaatgatcaaatactcaattgtgtacatacattatataccaaaatatattcgaattatagaagagaaaggaaacattaaaagccaagatatatggcaaagtaatataatctatacacaaattaacaatgagtagggtccactccaaactcattttactctcatttgaaggccaaaggagttgaaatatcttggctacttggtgctttctttattaagaattctttgaaagattcaagaatggaccggccaagaatctcagccaaggaatgctcaatttgtggcagaagatggtgagccagagggcttaaaagcagcttgttcagcacaggagagagacttattaggccctgtctcttgtgtgccaacacccaagagatcaagataataaagattgtgtgaaatgatgttgttcatggcctcattatctgagccctgacca

SEQ ID NO: 21947 - DNA, 481 bp, Glycine max
  Clone ID: jC-gmro02800039c05d1
gatgaataaatttcattatgaattttattgaaataagtttaaaaaaacgttaaaaaatcataagccaattccatgaagtctaatatgctacttgtaatctcttccaaatgcccctaaatgctaaagtagcttggttattctatagcaaaaatcagttcctggatgacaagactctataaatggctcaatcgtcaaaggagattcttaaaccgcaaccggtggtaatctgaaaccatcttaaatctaccaaaacttgtaaatggggaaaacttcataatataaggtaacaagaaagcatgaagcacttacataggtgttggaagattattatcatatgtgatacatgatagaatagtaaaacttgagcatctaacagacttttattagttcaaacgtctccgccttggagcacgagaatctccactatccacatcagacactcttgaagcatcgttccttctcctagaagaggatgttgaca

SEQ ID NO: 21948 - DNA, 552 bp, Glycine max
  Clone ID: jC-gmro02800039c06d1
ggaatggttaaggctctttatatcatattaccaatagtcacatcggggacaaagaacaccacctatatctacggttatatatcttaatttaccagcgttctcgatacctatataaccatgtttaaacaaattaaaacaaagacccaagcttggtaaaccacacacagcttcctcgatcgtttcaggacttcaatggctcaactgatgaactcgtaaacatattcatacatatgctatatactatatactatatatatgcacaaaattaacataaacaaaaatggatacagcatcatccgcaaaggctagagaaaaacaaactactatatatattttatttcagtcatcgatccatggaggatatatagtggtcaggctcatttctcacacatcgaatggagaagaagagcttgatctgttctggcctgtcttctcgtacgcatctgatgttgaccttttccgaaaacggaaggattctctagctcccgaaaacggagacaccggaggagtagaacccgcggtggaagccggagcggatccactgggactctg

SEQ ID NO: 21949 - DNA, 510 bp, Glycine max
  Clone ID: jC-gmro02800039c11d1
aatcatagaaaaacacaacgtcatatttcacattgaagaagcatgagaagatccatatatctataaagactcacatatataataattacatagagcacataaaagaagaaaagttaagcattaatcaaccaagatcattgttcccaactagtgtcgtgcagcatagtggttaataagcgagagagcattgctaggaacctgagcaacattgagcatcctagccctaatagagtgcttgatcttcccattcagcgccttcccggagaatccatcgccgcaagtgctctcatcggtcaaagcagaactgacccatgtctccacgttgctaatgtgccacgtgaagtcctcacccttaaccttacatagcttgagctccttcagcgaccggctgaggcggtcaacgctgtcgctgattttctcggcgcagtccttgagtgcagcgtgctctttgggttttaagcctttgaatttgttgcagatagcccacaaaggtttgggtggtttgggtgc

SEQ ID NO: 21950 - DNA, 517 bp, Glycine max
  Clone ID: jC-gmro02800039c12d1
aatcaaatcataatagtggaaactttactcattttattagagaagcacagagactatgcttaatggactgtgcacagttaaatttatcatactagaagggccaaggatttccctccaaataataatcactataaatctatcccactttctatttgtatatagatatacagaaagattgcaaacaagtcaaagcaatcttcaatgaaggaattgaagaagatttggcttgtaaagactacttcaaaacgtgtgaaatcagctactgatcttctaagtatgtatcaagtccctttctaatctaccaacaactaatatacacataacaaaaataaatactatccgtccacagaactattcaaagcaagagaaattgtctggtgccatcacaagttgcttctttttccttggtccagtcactgtgttcctaattaggggaagcaaacaatgccactgagatgcttgctagattcttaccaatcagctttgacttagctttcttgatggggcttttggagta

SEQ ID NO: 21951 - DNA, 453 bp, Glycine max
  Clone ID: jC-gmro02800039d02d1
ggggctcaaagtcataatcaaattgccctaataataattatgaaaatgaaaaccaccaagtttaaaaaaaactgtttcagcagccaagactgtttcccagaccctttattacattattgataatccttaaggacatcaaacagaaaatcccctgtaaacgaggtctttgagttcacaaaagggttccctataataaaaacctatttatagtcctatactactgcattagctacaagataaaataaactccacattagctttaagcaggttttttgctggggactccatcaccaacatcacgatcacaatttttggtgctttatttacataaaaggggagataaagggtgttcaaaaaactcctgccatggaaggcaggtcgtcgaagctccaaaggttcatagggtttcccgcggcgtcatgagttgcgtctccgccgagcaaagaccccctc

SEQ ID NO: 21952 - DNA, 466 bp, Glycine max
  Clone ID: jC-gmro02800039d08d1
gggaagaaaagagcgatacaagtgaatgtctccagtatttaattacagtcaatacaatttttaccaagacattaaagaccaaaaagtgcacccctcttaagaaatttagggcctccattttttttggttgcaatatattggtaacatgatacaaaacaaaataaattcttaattgttacacaagaactaattggctaatctctaagaatatcttacattttcaatatggatacagattctttatttgtgtaagtatagaattttgttgacaattagttagaaactaaattttctttggatttgtgtgtcttatttccccattcattaggggtttaactaacacaaatctaaggtgattttaataagggggatgatcatctctcagaagattgaggaggaactgcctttccatcccgggtttttattccagtacatattatattttatgtgaccaggagtgggatcc

SEQ ID NO: 21953 - DNA, 348 bp, Glycine max
  Clone ID: jC-gmro02800039d09d1
ccattatactaacacaactctttttattaatgacaaatacaaatacattcagccactccaaatacatgacttaagcatacacaactgattaaggaatctgggtccttcaatttcacatttatttaaaaccaggaacagtacttaagcaaccatagggtccttagatagagatactgttgggaattcctctgaaagctaatccctcctcactagaaggatagagcaaagtgtaaggcattttagctggcccatagcggtttctcaatggctcatttttgttcttctctataagcttcttttcaatctcttcaagcttcttttcaaaccttttaaatgcctttaatggac

SEQ ID NO: 21954 - DNA, 527 bp, Glycine max
  Clone ID: jC-gmro02800039d11d1
gacacgacaacggttactatattcctgtcacaatattgacagtaatgttcaatatatattacatctgctactttattgccaagaagctcaaagctgaaaacacttgtcctcataacaatcataagtaaatcaaatctataacgccggacaactggactaccgaaaatgacgtaatttaagggacaataattataagttcacagaagcaatggcttgatagctattcaggtccaagacatgaagacaagcttatgcttcgggatatagttccaggggtaaccaaacattacaatcaaaatcttcaagcaacaatttgtccaaagagctgctttcggatctctggaagctttttacggaaaactacatcaagacgtgcatcaagagtattttcacacacaatctttccatcacgagaagccaacaccaccccaccgggacagtagagatcgtgagaattgtgacgactgggtccaggtggaagatagacttggttgcaacaatgatctctgggggatcgaatttgcttt

SEQ ID NO: 21955 - DNA, 471 bp, Glycine max
  Clone ID: jC-gmro02800039e01d1
acatgcaactaccagcattaatcataatagtatcatatgccagatatagtcagaagtcaccactgggtccagttagaatacttagaagagaactaacaaagccaagaaggtattggtaaaatggatacaaccttgagccaaaatgctggcccagagaattgtacagtgccagcttaggcaactggtggacggagaacatgatcctgtgaggtatccactgcagcaggtggcatgaattgccacattgcaactccgggataactaataaaaggtaccaacttgttgccatgggcttggccttgtgccgcaaatgcagcaggcattgcagcagggggaggcatgaaactaggctgtgcattcaaagatttcagctgctgcttcagtttctccttctctggcttgagcctctgtttctcatcgcgaagttcgttcttctcagcctttaactctttaatcttttcttggagaccc

SEQ ID NO: 21956 - DNA, 480 bp, Glycine max
  Clone ID: jC-gmro02800039e02d1
agaaacagatatgatcattattttacaatagaattgaaatggtttcgatcaaaatgataaccacggtgtacacccattatggtaaatggctggaataataacacacctactatgaccatctacgttctgattaaacacgggggaacaatgcttcacatttaagcaacatgggtacacaataatcccctattctctagactcaaattctgattggactagtttccaatacctcattatatgaatataattggctacaccgggccattaaacacaagttacaaaagctattacaataatataattatgcacacggattagaggcatcaagaaaaagactcccccaattacaagctttagcggcagaccggttcttcttcggtggttgaaaagatttgtcttggtgcgcatccatgcttaatcaagcttgacattagaatatagaagggtgtcccttgtgagctgcatattcaggaggtagca

SEQ ID NO: 21957 - DNA, 471 bp, Glycine max
  Clone ID: jC-gmro02800039e07d1
aaagtgcataacaattgagtataccatctaataatgaaaataacgcaaataacataatgcttaaagcaacgttcatatcagaagggaaaaatagtttgaatcccatccaacaaaaattatgcgattaaaatccaattaaaaaagcataaagtaaaataagtttttaaaacaggtatctggaggaaagcaactacatttagtccacttcctcaatcttggggccagcaccacttccaccagaaggaggagcagcatactcatcctctgctgcaccagcaccacccacgtctggaccagcaccaccttggtacatcttggcaatgattggattgcagatgctttccaattccttcattttgtcctcaaactcatctgcttctgcaagctggttgctgtctaaccactggattgcttgctcaattgcatccttaatcttctttttgtcagccgggtcaagtttctcaccaatct

SEQ ID NO: 21958 - DNA, 579 bp, Glycine max
  Clone ID: jC-gmro02800039e08d1
aacacaaccaattaagtttagatcttgatctgattacaaagatattaacaaacctgagatgagaggacacaatcacactatctgcgtattacaaatatcaactgcaaaaaggagaaaggggggatataaagcggttacctatacaaccacacagtcactcaaagaaaagctgaaggttagctccaagttaattttcttcctttgcctggcttcttagccgatctctctctaagcaggaaatacaaagtctgtcaggcgcataccgattccttaaacgctcttctcaccatcaatccatggccaataacataaataatggttgtcggaatgccagttacaatcttatatccaattgggggggaaaagacaaaagaaaaaatatagttcacaaagaagggcttaagaacgatgctttgaaaacccactccttagtgcctcttcaagagacgaatgtcattgcgtgctgcgtgttaatcctccccgtgccacatttttttcagaaacaagctggtgctgagcactgtgtacagggccctctacattactggaaacgctttgctcttgggcttggttttttta

SEQ ID NO: 21959 - DNA, 436 bp, Glycine max
  Clone ID: jC-gmro02800039e09d1
agctaaagtaggagcttcctcatcatgcacataaaaactagatttacatttacaataaaacataaagacacaagggagcatagaagattgaaaagaaaaaattaaataaatatttttcttttaggaagacgctgacattcatttgtaaagcagcccaacgaaatccccttaattatggcgagcaaacttctttcaggctaatgggttttaattacatctctcagaaacttgagaaataattctgagaatgttggactatttgcatttccgtagttgtttggcatgagttatcgttcgtgatcaaggactctcgtggtcttgatgcccaaagagaactaagggcacgaagacgtccatagtactctccaataacaataaagcatcgggctgcttgacgaactgtgagtaatcgacataactgatgaagagtttgctg

SEQ ID NO: 21960 - DNA, 527 bp, Glycine max
  Clone ID: jC-gmro02800039f01d1
acaataataaatccatatttttataattaaaagtggtagattacagcgatgcacttgagaaacatattaagtggactaattctccctggtcaagcaagaaaaaaaccagctatgacccaaggtagagagagattatacacagaatactagtaattaactaagactggctctgcaattgccaaaaactccattgcagtagcagccacctgagaagacactaagacctagactagaccatacataatgaagattaatacccttacataacaacataggacactaagaaaacacggcttcacagagaatcccagtcgatctcataagaggggtacttctggagattaaaattatccgaatcaccttcccactgcggttcgctgacgtcagcgaaagtcagaaccgaaagcggcgaagaaccttcagaagaggaggaagcagcttcgaccttacaagagttgttgtcgttgtttgttgccttctctggcggagaaacgagtttggatcgcgttttcctcagaggcttttcg

SEQ ID NO: 21961 - DNA, 471 bp, Glycine max
  Clone ID: jC-gmro02800039f04d1
ctctcagcagcccaaaaaatacatataaaagtcggatgatgtggcagaatacaatcaataaagtataaaaaagaggaagcttaagaagctttattaagtaaacataaacctaattttacaaacaaacaccacaaatggcgaattgaactttcacaccattgctaaatcctgaaaatgctgcctgaacatcgcttagctcggaacaactaataattacctccctcaccccctttaaaaggaggttaaaacagatgggtggtcaaagaatattttgcagcacaactcctttcttagtcggctttagactggccagcacgagaagacaggataataccaccaatgagaccataaagggcaagtgcttcagcaaaaatgaggatgagaattattccaacaaaaagttttggttgttgtgcattggctctaacaccggcataaccaacaataccattagccatgccagcagaaagg

SEQ ID NO: 21962 - DNA, 390 bp, Glycine max
  Clone ID: jC-gmro02800039f07d1
gtgaaagatatatcttattggagattttactttgtacagagatcaaaattcctggttgacccaacaaacatacacatgattacaacccaacttaccccaaactataattatctttttttccacagaggacaattgtaacatgaaaacaaaccaaaactcgtaaacagagacgaaacggagggctacaattcacccttctctattcccatatacgaactcaaactcaaaccctaaatcttaagtggacataaacagaacgtgttgaagagctgcatgaaccaccgtttccggcgacgagaaaaaacctaccttgatcgatgcttagcacggcccttttcccttgttttcccgaaagcgctgcagaaacccgatgcagagagcttgggagag

SEQ ID NO: 21963 - DNA, 517 bp, Glycine max
  Clone ID: jC-gmro02800039f08d1
gtcaaaacactatttgtattttcttagtgtattttatcgattgtatgcttacaatcatcaacctcgtcttactaactatttggtttcaaagttggcatgtgtgtaatgtggctttgttttcatctccccaacacttggacaatgcttctactctgatacaaagttttatggataaaggcaattaattaaagaaaattgaaacagttttatgaatcaagaatcatcctttttggctgctgcatgtttgcatggaatatgttggttttgattctttagctcatctccagccaccaaaaaatatgcagtgtgcctgaaaaagttcatcattttggtctttgagtcatcatctatatctgtagtactgcctaatgcatgttgcatgtgatgtaaccacctctctgcagcttgatgcgtgaccggaaatggtcgatgccgagcaattagagcaggatgtcctcttttctgagaacagagaggaggaccaccctttcgctgcacgaagaactcgtattgggtt

SEQ ID NO: 21964 - DNA, 518 bp, Glycine max
  Clone ID: jC-gmro02800039f09d1
agaaaatctcaagccaaaagcatatattttattgtattagaaagcgcaactgtacatgagaaacacaaaatcctaactaatgaacaccataataaactcttccaccagtcgcacttttgtcatagtcattattaacattatttacatgacccctcatgcatgccttaccgtcacaagcacataaatgcattactccattaatgcatcacacggtactctatttgaaaatgaatcttctactctgtggctgcaagaacagttgatccttccaccttgaaaaatgcaccccagattttctcttcctcagcagggactgcagtaatcttattctttggattttcatagcatctcaatcctccaactgctgtagagtagaaacatccttgagggaaagaagcaagcgactttccacaagaacctttatgcaaatttgcattatcagcaaatgctacgtaaccatcagctgtgattcctcaatagagaggaaccttgccagcttgatcagaacccacaaaagg

SEQ ID NO: 21965 - DNA, 360 bp, Glycine max
  Clone ID: jC-gmro02800039f11d1
ccggcagcccggccattttttactggaaaaaggatttgccaaatccaaatcaccttttaagagggggtaatttctacaaccccttgagggggaaccaataaacgtccaaacaattaacttatgggggtctaaattagaacatcctttagtttattccccattagcaaaaaagggggccccaaaaaaaaaaaaagttttttggggagcaactgaattaccggggctaaaaatggaaggcaaccaatcaagaaaaagggcccttatttctttccactttttgggggcccaaaacctcaaaaggttccttttgggggggcctgggctataaactcctttagcgcctacctcccttcccttttt

SEQ ID NO: 21966 - DNA, 465 bp, Glycine max
  Clone ID: jC-gmro02800039g04d1
agaagggaaagtactacttaaaagagttttcgaaatatttgacacacactattttaattaaacagtccctttaacacagttaacaaagacaacaaaacaactctgaagccatggagatagaaacatgaagcttttcggggcattcccctatatgttctagaattcagaaggatggatccacaaagtattacacactatatattgcatacagcaaatatgcaattcgatccaacatctataccatcttgggggctaaaagtaggtaccttctggaggttggacaagcttccggttatgaggagcggccattttcttctttaactgggtaagtatgttctccatggggtactctctttggcaatttgcaagaagaccaaatttcttttggtcaaccacttcaggtcctgaataacacaagtcatgttgattccggaatgaaaccgaacactatggggctattttggg

SEQ ID NO: 21967 - DNA, 530 bp, Glycine max
  Clone ID: jC-gmro02800039g06d1
ggcggtacaatcatgttattatataaatagacatgcaaatctgacatttttagattcatattcgggttacatcaataatgttatttacatacaattgttttgagagcattcttacatagctttctttttataataaaatatgaaaaacatagatttcaattcacacttccttttcttttctttttttttaattaagaaaagtgtaaaaatggtgaggaaatattgatgtgaaaataacaccagcttttccctttgtgatactccctccctacgtaaactaagccttttcattgtagtctgtttagatgataataatgcgatttctatctttcttcagcatccaaaatcatatggaacaagtcctttcagctggggaccactaaacctgttgggttcaaaactttccattggaaaagattcaaagttgcctttaactggtattgttccacagagatcattattggaaacattaaagattttgagattagtgggacgagtaatgttctcttgggatggatcctgtcaacttg

SEQ ID NO: 21968 - DNA, 486 bp, Glycine max
  Clone ID: jC-gmro02800039g09d1
cagtaaaccttagccacttaggatgttccgcagccaagtgggaagcaagtcctatattatagccatcgtcctctcaatcgtcattaccaaacgggactcacagaagactattctaataataattgtgcagaactgagcgcgctcaaacaaagcacgctttccgtttccgcagcatcaaaatgtatcttatggaaatctaagcagtcatcaataaagctcctaacaagagccagctaataaaaacacaatcacttggaaaaaagatcaggctcccccattaatcaagacaaatagcgacttggctcccaacctttcccgcccctttaactctggcaattcaatcacacatgcacactccacaacatgcaccccaacacgtttctagaagcttaattgcagcacctaacgttcccccaggggcaataagaaccatctatgattagggcttgttctccaggttgtacagcccctacatgcatctccatt

SEQ ID NO: 21969 - DNA, 428 bp, Glycine max
  Clone ID: jC-gmro02800039g10d1
acagatataccctttattgataataaaaatgttatgtttacatggtagacaattatcatcctttatcaggttgcctacccttacactttggaaccttttaaatcatcaatcacagcttgttttttgttgatgcaacaatcgaacccatactttgatggtttgagatctcaaaccacaaagccatgagtgcaagtgacacatcttgttcaataaaaactagataactaataaagtatagtttgtagtaataaataaataagcatactcttttaaatgaatctatacgtctggacgctcattctgatcaaaaatacgattatggcaagtagggttgcaagggtaggcacaatctatctcacggaagggccttcgatcataaaaccaatcacccactgcctttgcaattgatgtcttggccaccactgggg

SEQ ID NO: 21970 - DNA, 342 bp, Glycine max
  Clone ID: jC-gmro02800039h02d1
ataaaatctactgccagattaatacattagacgtattgaaaaagttgaacataaaaggctctaattaaggaaaagaaaaaaatactatatgccttacggcctaacagtagctttcctaatatataccaatcttatctcttcttttttggtggaaaactacaaaaattatatcccactaatttccattttcaacaggcattttgtttttccaggaccaacatgccttagtcaacaaccaccccccacagaatctgtcgcatggtgccaccagaatctttaacttccaccatcccccattgcacgacctatgacaattactaatcaaatttcctaattgcccat

SEQ ID NO: 21971 - DNA, 472 bp, Glycine max
  Clone ID: jC-gmro02800039h07d1
aaataatcaataaagagaatgcatttaaaagtgtctcacatgttcttgttgcaataaaagtgtcgtttaaaagggctattgttaatacatgtgcttcatcacaaaacctgaattgagaaacattgattcaaaacctgccttaaaattaagatactatcccagaaagatagttgacaaaactgataaaaacactcccctgaaatgaactcaatctaactaaacaatcgcctgagacttgttaaggatcactccctcatatttcacctggaaccacttcatagcatcctcctttgtgacacggtgctggattccaacacgggacttgcaccttcggcgacgtcccacacgatagccaggacgcttcataacaacaaagaagtccattccataaataccagttgaaggatcatacttgattcccaaatcgatatgctcctgaatgccaaagtcaaagcaaccagtttcactgaag

SEQ ID NO: 21972 - DNA, 490 bp, Glycine max
  Clone ID: jC-gmro02800040a01d1
gaaaataaaattgatttattaacaaataacgacaagagtgtgatataaaggataaagaatggagcaaaaatcccctcgagcgaagggataaccctgaaggacctatgtccaaaagtaaccaatcaataaagaaatatgaaaaggaagaaatgagtgaaaacagatgcgaatccatcagcgatcccaggggcacttggtggactcaaaggcggcgcttcctttgaaaggaacacgcaagacgcatgatactttgggcttgagcgttttggtcttcaacacccccagcttgaacctcaccctaaggtacatcttcacgtcgatctcgtacaccccagtggcgatctccttcttaaaatccgcgctttgctcagcgttgagtggcaccacttgctgacccttgaagactgggtttagcaccttcctgctcttgtggccctggtagaacggctccgggaactgtgaatcgaaccttgcgccgtggaacattgca

SEQ ID NO: 21973 - DNA, 344 bp, Glycine max
  Clone ID: jC-gmro02800040a03d1
cccggggaacaaaagtttcttaagttaaaaaattccctttggggaaacgtcacaaaaataaattttaaactccccttaaaaacccggccctttaaaatttttcccccccccaaaagcgctttaaaaaaatttttttaaccaaaatgaaggggaccctaaaaaaccccaaaattgggtccccgcaaaaactctccccaaaaagtctacccggggtattcttcaacccctttttttttaataaaaactgggcctgggaaaattttgaaaccaaaccccccccggtgggggttctttttcaaacaaatggtttttgggaaaaaaaggggtcccccccttttttttta

SEQ ID NO: 21974 - DNA, 510 bp, Glycine max
  Clone ID: jC-gmro02800040a04d1
gaaaaaagcacgcattaaacatagttcaaacacaaattacatcctctaaaaagcaaatgtataagacaactgacacatctaattcaaatattaaagcagcaagtaagcattctcaatatgcctggatcacagttcatgagttactttcacgcctcactcgaaggagaaccttagtatctggctctcttggagcggctttccctctcataacctttctttccccgctcttcctcctcccttctgtgctttctctctccacgaccatcatcatcccttctgtgctgctttctttcttcacgatcatcttcatcccttctgcactgctttctttcatgactaacatcatcatcatcatcccttctgtgctttctttctccacgaccatctttatcctttgaatgctttctttccctatcatcatcctcccccctcaagttctttcgttctccatgcacatcctcatcccttaagttctttcttttccataaacatcctcatcccttctgactt

SEQ ID NO: 21975 - DNA, 501 bp, Glycine max
  Clone ID: jC-gmro02800040a05d1
gcaaatacaaattagaaacaactttgtcagttattattaagaagatacatgtttgttgtgaaccctataaaaatacaaaacagatagtgcaaaccaaccaaattaaagtcctccttttttaattgcatggtgtcaataatgccaccattctccaagtcttccatttcaaacctcatcaccttgccaatttcttttgagcttaggtcctgtgggtccctcctgtcccaacaactcatttggcaaaccatcttcaagggcttccaaagcagggaacaccttcgccaaattgtccagctcctttgcaatgtcataagtgatttttggaccccattgcctcaaaaagtataaccaaggtggttctacaattgctgaccccaaatactcaccagaaacaacttcaaaaccaacacccatgttaatcaccttctcactttcttagtttcattctttattccaatcccatcaaggccttgcatgacaagtccttgtttttggataaat

SEQ ID NO: 21976 - DNA, 488 bp, Glycine max
  Clone ID: jC-gmro02800040a06d1
ataagaatatatcaactacgtttcaatcaaagggcgaccaccgtgttaacaataatgaaaacatgcagaaaaataaaatccctaaactagaagagataagccacgaagccagagagtgcccccaaagcaatccaaaatcccgaaaaagatattcaggtcaagggatgatgaaaaaaaacacaacgttaaacagagtatcacaacaaaacacacaaacaagaacaccctgcaaaacactactacactgttttaagcctcatcttcctgaggttcttcctcatcttcatactcatagccctcgtcatcagcagttgcatcttggtattgctggtactcagacacaaggtcattcatgttgctctcagcttcagtgaactccatttcatccataccttctccagtataccaatgcaagaaggcctttctgcggaacatagccgtgaattgctcgctcacctcctgaacatttcttgaatagaggtagaatt

SEQ ID NO: 21977 - DNA, 490 bp, Glycine max
  Clone ID: jC-gmro02800040a09d1
ccaagaaagtcaaaatcatgcagtttaaatccctttactgatttctagcagctaatacaaaccttttgagttgcagttacccagcccttatttagttatatatagttacaaagccaacaatggtggaccacattttcttcattgtaatagatgataagatcattgaatgtcaagctactgatttccagaaacagggccatcttgtcctttcttgatatcatcccagcctcttacccatggttggccaggcgttgctcttacttcaggagcagaatgattatcaaggtttttcataactctttcccgcactgcagcaaagaccgggtttgtgctgactgattctgggggttgttcctgtccagatatccacttccataaatctggattctccaggtcgagaacatgaatgagggccttaatccgaatttcatccaaggagtgaatgttgtcctcaacccattttccgaggaccaaatccagttccaggaac

SEQ ID NO: 21978 - DNA, 330 bp, Glycine max
  Clone ID: jC-gmro02800040b01d1
actataaaatcttttataaacaagaggattgattgacaggtgggctgatttctaacagttcaaactaaactctaatatagttctagttgcatgtatgtctcaagcccaaataaagatggccaatggaaatgaaatacatagcttgcctaagagataacactatcacaactttattctgatttatccagcaaaaagtggacattaattgactccaaggagaaagatctccacctcacagaaagacacgccttatacttcctttttgattgagcctttctattctccacccggaaggtatttttgaactgaaaattctgatattgtagttct

SEQ ID NO: 21979 - DNA, 539 bp, Glycine max
  Clone ID: jC-gmro02800040b02d1
agagcaaaaatccatcttttattactaaatagtcctgaaatgtatgtggatgattttcaccagcacaagagaggatacatttgttttagtaaaggaaaaaaaagtcgggtaatgtcataccttctcagatctatacatcaatttgctgcttctaatctaatttataacaaacaagagcctaatgaagtccattaccctgttccttgcaatcatatatcattctttgtatatgatcatcaacaaggaagacaaagttggaaataatgacagtaaaaatagcattgttcttggtatttcatgcatccagcaagagtacctgtcctatcactgccaagaaggaaaaattggcttgaaatcagatttgggaagaggggcttcatggaaccaatcatgaaggagagcatcttctgctgttatcctcttttcagggtcataagttagcagctgctgcaacaagtcaaattcaagctcagataaaactggcaaaccaataaacgacgcagctggaaacttcttcctagtgtataaacagttgctta

SEQ ID NO: 21980 - DNA, 367 bp, Glycine max
  Clone ID: jC-gmro02800040b04d1
aaaggaaaaaaattcccccaattttaatttgggaggggccaaaaaccccctccacccttttattaatttttatttttcccggaaagagagctttttttaccccatgacaccaacgtgtagtaggggccctatttacattctacatacaaaagctgtacccatgcttcttcttctagggacaggtaaacaaacatgccccggtggatcgtcatcgtcgtcggcctcgcctctttgcaaaaccccaaaaaaaaccggggccaacgggggacccaaaaaaaacaagcgtttccaagttaaaggtttttatctttctttgccctacttaacctaacttgataaaaaatcgcctgtgggggggggcccaggc

SEQ ID NO: 21981 - DNA, 555 bp, Glycine max
  Clone ID: jC-gmro02800040b06d1
aaccaatatatgagaatatattctctttagtcttcattggttataatattatgtattactatgcctataaatcgattgtacaacatcgggaatttgaagcgaataaaggaacctaattcgcatagacttggagccaataagcattttgatccttccactttggtagaagggtcgaggcattataatccaaggggcttgtattgtattcataccatacagccacgcacaaattgcacaaatatcccaaagggcatggcaaataaattaacaaaagaatatagaatggggcttaaaaaataggcccaattcatgcctgattggagctagttcctttcagctccactggtatggaccaaaataaaaagttgcacttgtttctttgacagaagataaatcttcaatgccgctacggagttacccttattcttttccacctcctctttgtggatgttaaattgaatacagtccatttacttcaatttgcgtaaaacaacaagaccaaccgcagagatcgaaacaagtgttcctatgcagtattttatgacatcatatttg

SEQ ID NO: 21982 - DNA, 550 bp, Glycine max
  Clone ID: jC-gmro02800040b08d1
acgagaggaaaaaacatcaaccaggcaaaagaatataaatgagcaaacactcaatttctagccactgcttcaatcaagatcttataggatccagtcataagtcagtggtaaggtatgtaccagtagtatacaacaatgctactttcagtactatgatgcatatatccagctctaccctgaacgcatgagtgacaaaatataaaaaagaaaaagcgataatcgtttagcgaaattcttcaccaactcagtcagtgacagttcaatagaacattcctgaaaaggcaacttcagtacaaaatcacatcaatattgagatgccctgtgacagtatgtgaaccttcttaaaccttcaaagcagctttatggaccatggtttccttgtgtatttgatgacaactcttctccacaagatcaagcaatttctccaagtttgctgcccatgaattaagaatttcattgctatcctttgctgtttggaaacagactatccccatttggcctatcaatctttgccaccagcgccttagacacaaccatatctgagagatgc

SEQ ID NO: 21983 - DNA, 503 bp, Glycine max
  Clone ID: jC-gmro02800040c05d1
agctgctattactaaatagacaattggagccaaaggtggtttttcacaattatacataggaagttagcaactttttgtagttttgatcctgcctgcacagggaatatgcatattgattactgatgatttatgcatataatctttggaagctgttagtaaagcagaaacctaatgataatcatacacaaaaatagctatggcctatagcaacaagtgcgaacgaggaaagcaaggggctatatgcctttagtattcacattgatggaggctatagaccccaagtatgtatatgtcaagggatgacatttcccaacaagctgtttgatgaaggtgagctgtgtccacttgaccaaggaattggatcatgcactgatacaggggagctgtccttcaccttcatagattgcaaaaagctttccgtcttttgcggaacaataaatctctcacttccttggcctttgcgagctcttttgataccacccagtgacttctcacttccatga

SEQ ID NO: 21984 - DNA, 428 bp, Glycine max
  Clone ID: jC-gmro02800040c07d1
gggcgcaacaattcttttataaaagcaaattcgggatttggaatatcctaacaacgaacattttatcaaattcactaataaaatataaggggatcaatcaatgtttaagcctaaaaatagtaatttcaagtcgactaaaaatagaatttgggaaacaacctacaacttttggatgacaactgagttggctataccagcttgttctataaactggcccaaatcagtgagttgtttgggaggaaaacccattggctgcaggtggaaacttcttactcccccgggtcttgatgcgtaaatgaatgctcaaacctctctgattggatgggggtgattgaagcgagaaaccatgcgcgggcctatagccaacctcagctggattgatgtcactggttgggacttatttacaactaaacccattgttggcattg

SEQ ID NO: 21985 - DNA, 560 bp, Glycine max
  Clone ID: jC-gmro02800040d04d1
aatcaagccaactatatatccaagctgttaaaagcagctaacataattaatgacatatacttagttcacatccaaagccacatatgcaagcacttcctagattagattacaacatgaatacaacccgcgtccactgctggaaatggtcatttaataatcaatacaacaggtaaacagccaacagtaacgcaagtgttgtgtgcacaccaaacatattgaaattacgactgtacagatcctacagccagagacaattagacagatagctcgatgcttatgagcgaaccttgatgcggtcagttggacatgatgattccttcatctaggttggaaatagtataagatatagaatgatgaagactacagtcatgtcatcctccacaaactactatattaagaactgaagatcacaaaatggaacaggccttttgtccctttctcttctttatcttctgctatgggggctggagaactaccttgatggctgcatcaaaaacagccttcacattctgttgtgtttttgaactacattcaatgtaaattggagcaccgataagctt

SEQ ID NO: 21986 - DNA, 492 bp, Glycine max
  Clone ID: jC-gmro02800040d06d1
aagtgggaaaagtagtcaagtagacattagattaagctttatatacagaatatttgatacccctttaccatccttcattatcaaccatgtaaatatactagtaagaatgtgtatgaaaacactttgaaaccacgttgaacggagaaattttgcgttccaatacgaaaacgccaaactggggttgcttctccattgcatcgcctttacgctatcacaaacacacactaaaaccccttgcttattaatcttcttaattaaatcctagagtgaaagaaccaaagattgagaagaagagcataggccaggttggaattataaataaatcatcctaaacccatgacagaacaacatcctcaaaagttcttcctatttggtgaggtggaagaaatctgagacctagaaccgcaggacctgaaagaaccaactcgtatgaacattaaaaccgaggtgacaatcttcttgaccttaacagcaaccttctttagctttagc

SEQ ID NO: 21987 - DNA, 380 bp, Glycine max
  Clone ID: jC-gmro02800040e02d1
gaacttgaacaatgggttaatactaagggggtaaggcaaaattccaaggggatagtttgattacagtaagactaatggtctcctttaacttcttatgaaataaaaactcatgctaaagaattcttttacggtctattttaaagctaaaacaaacaaaggggaattggcagccccgccattaaataggggatgtcatgcaaaatctacaactggtccttgacatcattatcattgttaacagcatcagtttcaggctttgaatcttttttcgggtaactttcagcctctacttaaggggcatctctctcctcaactgttgcttaaagactgatgtccacacttgactttactgaatgaaaaagccgggaagccaatttctt

SEQ ID NO: 21988 - DNA, 534 bp, Glycine max
  Clone ID: jC-gmro02800040e04d1
aaaaacaaaatcggattaattaaaataaaataaagtaagaaagaaaaaaccttgttctttctttaaccgaagaaagagaaaaaatagtataaaaaagaaaaaaaaaaaaaagctgtgtattccaatttccatgtcaaccaggtggtggaggaggatagccactggtatctgaccaagtcgaaggtagaagctctgtgaaccccgacccgctaccaccgtcttctccgccgtgaccctgctctcccggcggccggaaaatccccatttgctggctagaagaaaacagaggatacgaagcataggaaggcagaaacgccggcggcggcggtgatggcaacaacgaaaacggcaaagaagattgaaacgctgccatttgcgaatcaaagaaccagtggtcgagtccatggaactcccctgtactcctcagcagctgagaatacccccaatagtctttcagaaaatcagaagagttctgaaaccgcgtcccctgcatcaccggtggcgcaaaacctgtcacaacagaaccggaaccgg

SEQ ID NO: 21989 - DNA, 532 bp, Glycine max
  Clone ID: jC-gmro02800040e05d1
actataaaattttacataaacaagaggattgattgacaggtgggctgatctcgaacagttcaaactaaactctaatatagttctagatgcattgatgtctcaagtccaaacaaagttggcaacaggaaatgaaaaagatagtttgcctaagagataacaatatcacaacttcattttgatttatccagcaaaaagttgacattaattgactccaaggagaaagatctccacctcacagaaatacagcctcagacttccttcttgattgagcctttcaattcaccaccggaaggtatcttgaactgaagatttgttattgtagttctcaacagaccatctccaactattaacctcagcatcttcacaaaatcatcccgcgatatatgctttgacctgaattgtccataatatattttgaatacatccatacccttgggaggaacctgatttctgatcgcatccaaaagccaaagacaaggcatccaaggggattttggaactttggggtgctagcaccatactaagaactttt

SEQ ID NO: 21990 - DNA, 435 bp, Glycine max
  Clone ID: jC-gmro02800040e06d1
cccttgaaactaatggatagggggtatcttttggcatttgccaaaaaaaccaacaatcgtaactttttactccaatctaggacatatataacaaaggaaaaaaaaatcccgaaactgggcattcattaattctatgaaatgatcacttggcaaaaagaaaactctagaattctttacgggggcaaaaaaatatagccacaaagcattttaccccatgagatatgaaatatcaggcattgcaaaaacccatggcagtccagcaaccatgtatttacttgctggacctcgtccaacccagggacattaggacaatgacaagacgttgacttgtcccccaactgctgtcgtgtcataaaggaggactttacagttagaccaaccaaaactccccagtagagcatgaatatcttctaaataaagtggaatcccccggac

SEQ ID NO: 21991 - DNA, 558 bp, Glycine max
  Clone ID: jC-gmro02800040e08d1
atagcaaactattttctagttcttcattttaagtacaaatgtgattcatgtggctaagtaagggcttgtatggccgaaaactacgtcctaacaaattaaatggttccatcattgctttatctcgtggattgattcattgaacgtttgtagtataccctccatctttagccgaaaatgaggaccaaaatttgcaccttcttcttcccttttctaaaaaggaatctaaaacccccacgagttaagcccaaagaatccccacctatttacaccaaataaacccgatttaaacattactattattaatccatcagccggttcaatttctgaacccgaacccgaccggctgaaccgggtatttaaacccacacgtgtcaaccgaattctgaaacccctgtgtgaaatcattctgaagaaaccacgaattattattcccgacccgttggtttctcacgccgctttgcacctcttcctccatctttaacggaaccgatgagtccaagtggcataacgtaaggacataaaggtcattgcagttgtagttcaccatcccctgagtct

SEQ ID NO: 21992 - DNA, 363 bp, Glycine max
  Clone ID: jC-gmro02800040f03d1
ggggaaaaaaaaaaaaaaaggggggggccccccccgttttttggtttttgacaaacaacaaattttctttttacaaaaccggcccaaaaagggggaaaaaaaaattttttagagggggtctttttttttttcccagaccaaaatttttttttttttatttaaaaaaatccggtgggggccattttttttttcaaaaaggggccattaaaatgaccaaggggggggggcctccccgtgctatccccaaaaggaccccccccgcccgggttataaattcccccggaaaccaaaaaatttgggggtttcccaaaaccccggggggtaaaaaaagggggaaggggggccctcaaatttttctttttt

SEQ ID NO: 21993 - DNA, 441 bp, Glycine max
  Clone ID: jC-gmro02800040f04d1
gattgcaaattgtacacattcatagcttttcaagggccgctaatggacccgggatgcacacatacacaaagttcaggaacatataaaaagaaaagaccagattatagacttttacatacttcagttcacaccaaacaagggacctgcagaccattctcaaactcaaaacccaccacgaagacgcaagacaaggtgaagagtagactctttctgaatgttgtagtcagcaagagtccttccatcctccagttgcttcccagcaaagatcaacctctgttggtctggggggataccttccttgtcctgtatttttgccttgacattatcaattgtgtctgaactttcaacctccaaggtgatagttttccctgtcaaagtcttcacaaagatctgcatacctcccctcagacgaaggacaaggtgaagggtaaactccttttg

SEQ ID NO: 21994 - DNA, 495 bp, Glycine max
  Clone ID: jC-gmro02800040f05d1
gaccatctcatgaaatatttttttattactttctaacaaacgttattgaaatatatattaccatctccacactcacaagaatccaataagatttcataaaataaatatcccttacatacccttcaaaggtcctagttcctagttccgtaactgtgcagattgaatcagttgggccaatgcagcagcatactgaacagctgtatgctgagaggtataattgtcagaaagcccatattctgcataatttggttctgtatgcatgaactgaccggctaatgattttttagacacgacttctttccatatatcaatgaactcttccaaaatttgcttggatttttcaactgacgagatagggagatactcaatctcaatcataattcctttgagactctccgcttgactgggaacaactttaatcaccctgatctgaaagtcacccaacttatacagcacttcctcgaaatgaagggcgactttggacttgtaggactg

SEQ ID NO: 21995 - DNA, 570 bp, Glycine max
  Clone ID: jC-gmro02800040f06d1
aacagaaattacaatgttatcatcatatcaaaatctcgaaaatctaacaactacaatatcccataaaacgaaaaatctgagtccaataactacacgttcattctaaaaacagaatttctaaccgaacaggcacaacccatcaacggatctaccctccccaaataaaacccccaaaacaacgcgtacagaaaaataaaagataaaaaaactacaatacaataaatattttaaaaaatgcaaatgtcccagtacagtgaaaattattgaatgacccttctcgaagggtaaaaggtgaaataaaatcacatcaaagagcaacaacaccaaccatcaatgcgaaaaccaaccaaaagtgaaaacccaacccaagcctctccgcagcagcagcaccgttcttcttgtccccactcgcgggtgtggtcgcgttttcgccactcgctgctgacgatccgctgctccccgcaagcgcgacggggagagcggccttggcgtgaatgttgtcgtccttgaagccgtgcaccgcgggcacccccgccgcaacgggacccacctgccacacgtggctgacgt

SEQ ID NO: 21996 - DNA, 496 bp, Glycine max
  Clone ID: jC-gmro02800040f07d1
caaacctcgtccgtaataattaaataatcaaacccaaaggtctccaatttttttttgattgcgaaaggcgttgcgaatttgttcaccacacaaatatatatctcaattccaaatgtatgtactagaatacagtacagaaaactgtagccgatgaagggagatgaaatagaagctaactttattgtcaccctcaaaaacaaaagaaaaagaaaaactgaattcactaaagataaatcaaagagcgaagaatcctaataaatagaataatagaaaaaagccgcggcaactgaaagaagggtggcggatactccaacaagaccgagagatgcagcagcagagttctgtgggggaggactgacagcacctgatggagaagggctataaagagtggtgggggcggtggcggtgctgccgccggtgacgttgatggaaagcttttgtcctcccaacagtgccccggaattccacagatgtagtaatgttcaccggatttgct

SEQ ID NO: 21997 - DNA, 477 bp, Glycine max
  Clone ID: jC-gmro02800040f08d1
actgaactctaaaggaacttattgaaataaaaagggtcatacaaaacatcataattcacaaaaataaaagttgaaaataaccataacagctatgcgaatcaaaatttacgtaaaaaatgatcctaggaaacccatatttgaacatccccaaccgtaaatatccccaaagcaagataagcccatcaacaacattggcccaagctatatccacacaatacagggacaatttacagggaaaaaaacaaaataaactttaaagcaaaacattggttctgaaactatcaaatctactggggtcatccaccgtatcgaatcaaacggaccaacccttagttggcatcatttatccgactggtttcatcttctaccaacttgtaaatgctgaaatggctgaccctgatcttccactctcctttagggggatcatatgatacaaattcagccccttggtccccagtctttctcttgagcatcccc

SEQ ID NO: 21998 - DNA, 556 bp, Glycine max
  Clone ID: jC-gmro02800040g03d1
acaggacggagcggcgcgggttctggatcggttttttgcgccgctacttcgaagcaccctgcccttttcctcctcctccgccaccctccgtcctcctccccctcacgtgccgccgtggcggcttcatcccttcctgcctctccgacgacgctgtctccacgtgcaacttcgaccgtggcttcaccgtgatcgtcgccatcctccaccgcatcgagcccctcgacaactccgccatctcgaaaggtgtgtcccccgccgccagagactccgcgaagcagaccatttccaccatgcttggattgttcccctccgaccacttttctgtcatcgacactgtctccaaacaccccctccaccgcctcctcttctcctcccacaggacgaggtgaatacagaaacaatgggaatcaggacgaacatcctagtggagtgcctcgtccatatggtggtggacgaggacgtggacgtggccgaggttcttataataatagaggagacaactccaataatgaaagacaggactctggttatgggggcagatggggttctaataata

SEQ ID NO: 21999 - DNA, 502 bp, Glycine max
  Clone ID: jC-gmro02800040g05d1
ctgtaaaactgtgaatagatatttgaaaaatacatgtatattttatcgtgcatacatggttgagggacaattatttccctatctataattggtcagactacaatttgaccaattatacaaaaccctagaattctctgtaaaatgaagatcagactacaatttgaagacgatagaaaaagatggacagattgtgattacaaaaaaagcctgagaatgaagaggaagaaccaatcatttttcctatcaaaacagatttgaccaaagggacttgcaagagtttctagcttagatttagctgacaactttctagacaatgagtaacttataatttgatgcggtcagccaaaaatcgattaaagactccctcttccatccacgatcgttaaatgagacaattattttgtgaataccaaacaaagacacatatctcaaatgagcctcagttcatactctccagccattgttatgtatctcacccatggaagagcctgataaccacttt

SEQ ID NO: 22000 - DNA, 593 bp, Glycine max
  Clone ID: jC-gmro02800040g06d1
gcatgataagattgaaaattaatttagaggctatgccatatatgattattattacatacaactttaacgatttaaactgtatatatatatgatcctgcaactatattcaggatgaattcgtttttggatgagattaaaacttcttgataaaatcgtaaatgtgagtattgatttcctcggcggcttcttgattattgaagtgagccactcctttctgcacaatcacttgttctaagtttggcacatcttgcttgaaccctccaccgaggatatactccttcaagtttagcgaggtatataccgagtccaactcacctgtaatgaattttacgggcaccttgatttgcactcctgtccatggagctgtcagctcccaatctaagttgaaatttctgtagtagttcaagcctccagtgaagccagttttttcgaatttggagacataataagcaagatcatcttctgtgagccaagagggtaaggaatcaaacatatttggattgaatccagttccaaactctccatgcggaaggaatggaggaccagttttgcgacttgtaggatgtttttgagacatacccagtggcaactta

SEQ ID NO: 22001 - DNA, 510 bp, Glycine max
  Clone ID: jC-gmro02800040g07d1
ggtacaaaattctgataaaatttccattgcatcaaaacggtaacattgcataaccaaaaaataaattgtgagtaaaaggagaaaaggaaaaaaaaaaacagtttaagtattgatgagatgacattagacctatgaatgaagtagtagtagtcatggaacacgcaaattattcatccacacctagcaagacatccattgaagggagtgattaacttcacaacaatcttaagcttgaggcttctcagacttgagtggcttcacaacttcccaggtgaagtcagggtcatcccttccaaagtgtccataagcagctgtcttgaggaacctatggccacccctcttaaggtccaagttaatggtgatcattccaggtctgaagtagaaattctccttcacaatttgaagaatctccttgtcaggaatcttcccagttccataagtgtccacaaacactgacaagggctcagggacaccaatggcataagaaacttggacaatgcaccttttggc

SEQ ID NO: 22002 - DNA, 562 bp, Glycine max
  Clone ID: jC-gmro02800040h02d1
aaactcttaagtatttttcaatttgcagaacaagaaaatttatacaatcttgatttaccttcccctccccttatgcagttaatgatatttatacaaatatcactattaggcaaaatcaacctagaactacaaagtggggtcacaaatttgaatttctcaaaaaaagaaagaaagaaaaccttagcaattctcttactaattaattacctcccaacatcattttcctagtacattttcccactctatatgtgagactactgaggattgaaaaagctcacattaacaccagtatcaatgatgacatataaactagccgcaaccaatatggcactcaaagccactcccaatgtccccaagaaccaattgagccaccacatggcactatacttctttggcttctttgtcttaagccacatgaaacatgggtacgcgaatgtcactggcaacgccactcctccaatcaaaccagccttttgagacaaaaacggaacagccactcctatgaagaagcacaagaacccaaagaacaccctaataaatgcacgcagccaccacgggcatg

SEQ ID NO: 22003 - DNA, 445 bp, Glycine max
  Clone ID: jC-gmro02800040h04d1
aaaaaaaaatatatatatatatatatataaggtaatataatataatatttcacagacatacaaaaaaatcctactacaatagcaatgaaacaagaattttctactaggggtccttagtccttacatgtcgacacaattcctaacatagctaatggatcttcattcttcacccagttgagatcatttttcttatttttaggtacctatgatctcattttttcctagtgatcaatggcagtcaaattcaacaatcccaagaacagataatagtcaccacacgtgcagaccaaagccggcatgagtagtagttaggtacaatagtatagtaggtacgcttgaatgtgatttttttggtgcttttttttttaacgaattttaaaaataaatgtgagacccgtatttccttttggggtcccattgaccctaaaaaaatcaaaatgtcttt

SEQ ID NO: 22004 - DNA, 460 bp, Glycine max
  Clone ID: jC-gmro02800040h05d1
aaaaacaaaaaaaaacccccctttgtggggccaccattgggcaaaaaaaaaaataaaaccaaatcttgggggagccccccctcctaactcaaaaagcaattaaaaatttgggccccgggagggggaaaaccccccccaccaaccccgtggaaaaaaaaaaaaacccccatttggggctggggaaggcttccccccaacaaaaaaacctctaaaaaagggggggatacacccggggggccccccccgggggtaacccgagtgggggtatcccccccccctggggggggccattaaaaaatttttaccccccccttactcggcgtttttccccccccccccaagttgccctttccccccagggcccccccaattttgggggccctgggggcccccgctcttgggcaccccggagcccccccacattttctccctttggggcccccttgcccccccccaccaa

SEQ ID NO: 22005 - DNA, 521 bp, Glycine max
  Clone ID: jC-gmro02800040h06d1
ggtcagcaagttgcatcaaatcaacccattaaattttgtgaggaaatcaaagaagcattttggaagtcacaaacaagtttattttacatatatgtaacgttacatagaccctacaggatacaaggccatcgccatagcaacttcctacaaacgaaaaagtccaaacctcattgtgctgcctacatatcaaaaaccacccatatcagatataagcacacatcagttttccaaaggccatatttagaggccttcaatgaagttgaccccagtgttcttcaaccaaacattgccttggatgagttgtgctaccgtgaacttgctggcctcagctgcagttttgatgatatggtaaccaggccaattcactctcttgctggtaccggcaccggggccattattcatgtactctccataatacaacgtttgcaaaaagtctttactttgggcattccattcagcccatcctgttgggtcaatgtggctgtccaatgtcgactgcatcacaacagttctggagtact

SEQ ID NO: 22006 - DNA, 455 bp, Glycine max
  Clone ID: jC-gmro02800040h07d1
aaattaaaaaatgacgtatatatataaattaaagaatcctatttcaatacacatggatctttgcacttgttagatccatgttcattttttctacatacatccattatttatgtggatagataggtctgtgctcaccgatagatcatattgaatatatcttgacctaaagaatcttttaataaattgacgaaagtgataaaataattgagctattctagctacatgtgaacgtgtgtattagggtgaagtatcaatgaccagggcctttaggactaggtccagaagccaaacgctgcatccaaaaccccatggttttcttggcttgttcataggctgatgaactgtatgtttgaaggttattagctcttgcaaatgcaaactcctccgaatgagataaaacccttgcctccaccctactttggctaataaaattgcaacccacataacagccagca

SEQ ID NO: 22007 - DNA, 494 bp, Glycine max
  Clone ID: jC-gmro02800042a05d1
caaatatcatcacaatattcatcatctttaaaaaaatgaggaggggcagaaagtgaagagacattaacattacaaccctttttttggataaaattacaagacaaactaagaaggttcagttccactacagcctagtagcaggacttgccactaattgacattttaaggttggattcaaaacccatcaaataaaaatgtaggaagaagaaaggtcaaggactactacatcactgttataccacccaaacccttggccttcctcctacccctttttttgtcgtttccttttaatcaacatttcttcatttaggtttttgcggccataatgtgatgatcacttggccatcatcaccttaacgaactcctggtagtttatttggccatcgccatcaacatcggcctcgcgaatcatctcatcaacctcttcatcggggagcttctccccgaggttggtcatcacatggcggagctcagcagcagagatgaaccaattc

SEQ ID NO: 22008 - DNA, 480 bp, Glycine max
  Clone ID: jC-gmro02800042a06d1
aagaccacactcttccttggatttcccacttgtatatgtgagacatactttcagaaattacaccctacataaccaacatggacttagtagttttctgatcctatacggaagaaaatcttaccagaaccaaatgataaagttcacaacataaatatttatacaaactccccttagtccagtatgacatcacaaccacaaacaggcatatttttgtatttaatggctggatggatatatagcagctacaggtgagaccatggaatctactccacacacatttcgacctctgcagatctcgttatattcattctcttcccagctttcgccccatgaattcttaatgatccagataggattgttcttaaaacgaaagggagcatatgcacctttaccataaccaacttgaataaccccatgatccaaatgctttccacagatgtatgggcatgaaacgccaccaacatatgtttgcataaaaac

SEQ ID NO: 22009 - DNA, 501 bp, Glycine max
  Clone ID: jC-gmro02800042a07d1
gatgtgatcgatgcggagatcgggggtgcccttgagcatcgagatcgtgttgaacgaacccgagtgcgagtagccggtcagattgaaggtcatgttcgtgaactgaacgtgactgacgccaccttcgatggtggctcggccgcggatgaccacgccggttcgcgactcgcccacgaacacgcggggatggctcgcgtcgctgccgcccttcaacacgtagatgaggatggagctgccctcagcgtacgttccgttgcgcaggaagtatcaggtattcgctggatccgaggcgtacgctccgttagcgcgcgttgcgtccgctagctgggaggcagtcgtgatgtctttaacgcgtggtccctgccgggcacgcaccatgcgcatcggaccagttcgcaatcgcggtcgttgtgaccgcctgtgtggtcgcaccaccggagccggtaggcaccgggccttcagctgttcgatgagcgccgtcagtagcggattaccggagcg

SEQ ID NO: 22010 - DNA, 540 bp, Glycine max
  Clone ID: jC-gmro02800042a11d1
gaagtagacatgtggcttgtgactcacttttgtattgacaaaattttcaaacgaataaatatccttgctatcttggttttaaggccaaaatcaactattttaaaaaataactataatttatggtcgagattatccctactaaccaattcgtagcttctgatgttctaaacatttaacaacggagaaacttaggaaaattttacgggtatataatcaaactaaacacccaaatttagggcacatcagtaacattccgctccccagctatagtgtagttctaaattccacgaagtgttttgattcccatatagtcactcaagcagttgagcatcttgattccctaccaattgatacagataatctttataggaaactttcgatgttaagttcaacaaaggagcagggatcaggaatgtcaaagttgtttaatacctctggatgaacaatgccaaaagtgccaatatgttttcctttgtaaatgattctagcttgtctaccggcaagaaactcaggctcatctgactgctcaatataataacc

SEQ ID NO: 22011 - DNA, 508 bp, Glycine max
  Clone ID: jC-gmro02800042b03d1
gaaacataattgacatcaacacgaataaaaccgcacaaccattgaatagtgggaaagtaacaaaacgctttacttgaagcggacaatttcccatttatattgtatcactatcgtctaaataaatgactccataaagcacatttacagcagcacaaaatgcacagccactgccttttattaatccataaatcacttcatacatagcactgcattactaactatgacgttcacacttcaatggctgaccaacttaagagagtttgccttctcttgcagagaatccaggaggctgtcaaagctcttcttaaacgagtccactccttcaagttcaagctgggaaccaacaaagctccagtcaatacccaatttctggagagcattgtatattccttcagcttcagatgcatttgagtctattgtcctggatacgggaccatgatcgataaatgcttgaaaggcttggtctggcattgttgatacagtgtcgggtccaataagaggagcaaca

SEQ ID NO: 22012 - DNA, 374 bp, Glycine max
  Clone ID: jC-gmro02800042b04d1
aaaaccataatccatagattttcttattgcatcatcatcatcatcaacaaaccgcatttcaaaagaaagataccgccccctggatgggcccatagtggttcccaaaacacacaggccaacaaaacaaaaacaaaccaaacctgggaaaattaaagaaattagaaacccccccaatgggggctcacatttttttaacctttagaaccccccaatccttcgaaaatatatcaatgttccctgaaaccggttgacccagtcaccggcacgtgcacaacctccttatttaattattattcacacgggaccgggttcttccctaattacttggtaataattattttatatggcaagaaccaaaccgggttcgggttttc

SEQ ID NO: 22013 - DNA, 502 bp, Glycine max
  unsure at all n locations
  Clone ID: jC-gmro02800042b06d1
gcaaacctcgtcaagagcttcattcacaagtaatcaaaggtatttgctgtggcgtctactggtctatctactgcatataatacaataaaaaaaatacaagtttttgcaatagacatcgatccatgcatagatcaacaaagtaacttactttaaaagtaaaaggacattttaatttacttgattggtataaattaaccccgtaaagaatacttcttccctgaaaaaggttgaaatttcggctcttctttctctttaggtggctctggttttgactctttcgcctttcctgtctcattagtacggtttgcatttgacccaaacacaagcttgccctgagattgacgagcattactttgtgaactagaagctgtagaagacagcgaattgacaacatcagatttctggtccttggaccctgaagaagaaactggaggaggctgataatttaatgngtttccatccaagcgtcttccagttccagaaaatgggttgaacttgggct

SEQ ID NO: 22014 - DNA, 558 bp, Glycine max
  Clone ID: jC-gmro02800042b07d1
aactaaaagaaattccataaagtaattttccctatgatcccagaaatatttcactctggaagaaaatatttgagcagaggataggcaaaacgagtgttacaaatgtcaaaccaacacagcagttctaagtgatacagtaattaaccagaaaactcaactaagaaaaaattgattcaaatagattattcaacaattggttattaacccttaaatctgcttcgtgcctttataattttcttccaacagtcattcaccacgcgtatggcaacttaaaaacatattggaaatgaagaattgtgatctcaaccaacaatcaaaattctactccatgactgcaactcctccagcagcttttattttttctattatttcatttgcctcctcttttgtgactccttgttttagcacaactggaaccttttaacaagatctttggcctctttcaatcctaggttggtaaatgctcttacctccttaatcaccctgatcttttgagcagcatcaaatttctccacttcacatcaaaagctgttttctttgcccttttcttcctaacct

SEQ ID NO: 22015 - DNA, 380 bp, Glycine max
  Clone ID: jC-gmro02800042b09d1
gggacgacaaaagtcataaacattttatttgggaacaaaatgcaaaaaacaataactgactgaccctgtttttatcctgcattgcatccaggacaaaactaaaaacagggaaaacgggtttttattaaaaaaaaaattgaagaccttaacgaccccgacgttcaacaagaagaagaagaaccccccagccggcaacaaaaacaaagggaatgatgacttgggcgagactttttgaattgaagcccattctttaataaaaccactgctcccccaaattttgagcagaaggaacagcagggggaacattgttcgccccaaaggaagacagagaccgcatataaggctttttgtcaaaggtgcgagcaaggccaacaaccaaa

SEQ ID NO: 22016 - DNA, 405 bp, Glycine max
  Clone ID: jC-gmro02800042b11d1
ggggcataggggtggggctgaggctcttccgaaaggcattgcgatctcatttcctttggcttcaggataggcctaataagaaaacaaataattccaattcatatatgaacatttttgcctccttatttcttgaaaatgtggaattggaattccccgaggaattccgatctcatttcctttggcttcaggataggcctaataagaaaacaaataattccaattcatatatgaacatttttgcctccttatttcttgaaaatgtggaattggaattccccgaggaattccgatctcatttcctttggcttcaggataggcctaataagaaaacaaataattccaattcatatatgaacatttttgcctccttatttcttgaaaatgtggaattggaattccccgagg

SEQ ID NO: 22017 - DNA, 453 bp, Glycine max
  Clone ID: jC-gmro02800042c03d1
ggggcaataacaagatataacacattgataagcagagcattgccctgaaattaagcatcttacaaacatcactgtgcacaaatttttatttcttcaaactacatccccagttcataatttattgtgcataaaatcaaattcaaggacacctcctacagatagaattattcaaagagatacacttgatcatatcctttcccagccgttccaccaaaagtaggtttgtaattgtagatgagattatctcgcactttttgagcatcaggtgtgtttgtggatttcctagcttcacttatgaaaaagtttgctgtggactgagtaacccgaattgcatcctctgtgtgaggggctttcaaagatgtagcccattcaaaagcatttttctctgggtgccataggttgacagtcacgggatatttcctaccacgtgctgtggaaacgaaagtctttcca

SEQ ID NO: 22018 - DNA, 524 bp, Glycine max
  Clone ID: jC-gmro02800042c06d1
ggggagaaacatctatgggggagtttatcaaaagcaagactcgactagacataaaatgttagttagagatctacacttatgacacatgcaattgttgcactatattgcaggagcaacatgggtgaccaacttgatgggcaattctagttccccagactcaactccacgaagccttaaccaaacattctgcaccacctcaccattcacacagttgatactggtttcacggacaagacagttttcaccatcagggatgaccttccttaatggcgtctcaccagaggacactcttaagatgtctcttaatctggctgcaaagactattggttgaaggttcaggaaagcattccccatcttgtcatcagccttcaaaagaactttatcaaacacttccaaattcagaactcccaagggttctgtcagagtgaaattcagctcctcattcaaacaggattcaagcagctattaattaccttggtctttgcagcctgattccctagcttgagcacaacataaggatcact

SEQ ID NO: 22019 - DNA, 528 bp, Glycine max
  Clone ID: jC-gmro02800042c08d1
aaatactagaaaaaacataatattataaaaactaaagtactgagaaaataacataaccgatgaaagcacaaagctacaacggagcaaagaaaccaaaacctttgaacatacaagaaggattcacattcacactttttaacttaagcaacacattaacctatgatcttccgctcctttttatcacacacatagcaaaacgcaaagtaaccaaccaaaacgacagagaaaccattactattcccatttggcggttataactataagttattagcgaaaccgttaaccagcgccaaggcattgctggtgaacttcttgaccctagtgacgcgatcgcatacgctcgtcttcacgggaccttcctctacaccctcgaatccgtcagtacacgtttcctcgtcagtgagcgcggcgctcatccacgtcagcacgttgctgagcccaaaccggacggagctggagtcagagttttccgctccggctggtttgagccggcgcatctgcttaagagagccacggatctcgttcaca

SEQ ID NO: 22020 - DNA, 553 bp, Glycine max
  Clone ID: jC-gmro02800042c09d1
acaaaaaaaaaagatattttaatagatttaaatgtaaatgcaccgtctatatatcaattcaacttacaacaaatcaattgactctcgctttcagaaagcaacaaggtaaagcaaatatatcatgtgaacactgaatgagtttcaattttaatacaataataacagctccacaaactagactagcgaactaaccacgtaaagataaacatataaatgtttctttgatggatggataatttatcaacacaaacctcatctctggtataaacaatacatggtgcttttcaatcccttgtttgtcaatgaggctgcaatgctccttgaatatttttaacagcgctgtcatagtgcacaaagcccataaaccaaaattcatggttgtcaacagagataatctgtatatatttttcagattggttggttttgcttgtggatgcgtttacagctctcagctggtgcaatggaatgaccaccttataatagcctcattgagtctggtcacccacttggtaagaaagtgggttatcactacaaaatgccagcttaaccgttg

SEQ ID NO: 22021 - DNA, 533 bp, Glycine max
  Clone ID: jC-gmro02800042c10d1
actaaaagaaattccataaagtaattttcccgatgatcccagaaatatttcactctggaagaaaatatttgagcagaggataggcaaaacgagtgttacaaatgtcaaaccaacacagcagttctaagtgatacagtaattaaccagaaaactcaactaagaaaaaattgattcaaatagattattcaacaattggttattaacccttaaatctgcttcgtgcctttataattttcttccaacagtcattcaccacgcgtatggcaacttaaaaacatattggaaatgaagaattgtgatctcaaccaacaatcaaaattctactccatgactgcaactcctccagcagcttttattttttctattatttcatttgcctcctcttttgtgactccttgttttagcacaactggaaccttttaacaagatctttggcctctttcaatcctaggttggtaaatgctcttacctccttaatcaccttgatctttgcagcagcatcaaatttctccaacttcacatcaaaagctgtt

SEQ ID NO: 22022 - DNA, 524 bp, Glycine max
  Clone ID: jC-gmro02800042d03d1
gaacacaagcgtataattttactgaaattgaatcaacatttcatttccaaattttggcacacaatcaaataaaattgttgagagctgaattttccacccaaaaataattttaaaaaccagaaacaaaacgattagataaagaactaattgaaatgagtttcacaacagaacaggggaatctactaaaagcaagttccactagaaataacagttcagactgttgaaggccccctgacaagaacgaacaccatatcacaacaagcaccagcaactcaatgtgcacgagttctactactttctgcatttctaactggattgaagtatggatgggccatggcttcttttgctgtgggacgttcttggtgatcatagcgtaataacttgtcaacaaagtcaacagcctcaggaacagccatgtgatgattttctacattaatgaactttgcccatggcttgcggctatgcctcccgataagtgctgcaagatgtgggtccaactctattcgatacttatctaaatatgc

SEQ ID NO: 22023 - DNA, 422 bp, Glycine max
  Clone ID: jC-gmro02800042d05d1
ggatcacaagaaagaattaaattataaacgcttggtgatcgtaacaaatccaatgaatcaaacaataggcatatcccaacaaagataaaaaaagagggcattcaaggacccaagttttggtacaaaagaatcaaaaaggggaaagattatgctttaacaaggaatttgacgagggaaccatctaaaaacttttactggaagctttacaagactcactggcaaattagccaatccagcgcagcaaatgcaacatgggcccaagcaacttaatattgatccaagcacccagataactggacccacaagagataaaatcaaagcccaaagagcaaagggcaattcgagcaagaaacccagtgggctggattcgcaaccttcttcttttcccatcttcttggctttggttgagccgaatttcgagc

SEQ ID NO: 22024 - DNA, 517 bp, Glycine max
  Clone ID: jC-gmro02800042d06d1
gtaaatcacagtcgaattttttttcttataaataaaataagttggctgttttgcagcaattcttctattacaacatattaggtgtaattacaagtcaaataaggaattgagccaataatataaccaaaccaggtgttcctttataaattaaattcatctgtacacgggcatagaaaaaaatacataaaaattatttgttcagaacttggagagtagaccaaattgagtttcgggatatacacgagacgagattatattataacaattcttctcaccttagcagtcgatgtcgtgcacacttgttttccaaagacctccaagaaagacaaatttctttggctagagatcagacttgaacaaatgttcgtgttcttcttttagctctctctccaatcgtgtatttccatagcgagatttctggtctatccaaccaataatatcggagaatacaatctgcaaattttgtggtggctctccatacaatagaccgtgccacatttctggatacgactttagt

SEQ ID NO: 22025 - DNA, 539 bp, Glycine max
  Clone ID: jC-gmro02800042d09d1
atcaaatacgtaaagaatcaacttctcatcacaaccttgcaaaatacaaatagctaccaatacatttcacctttactttattcattcatattagtaaaaagtaaaaacccatcatcccttacaataaaaatcagaaggggatagagctattacagaactaaactacttatacagccttttttgaatcctcactctagaaaatttaaactttatataaaaaaaaaacaaaaagccaaaaaaagaaacaaacgaaaaaaaatcaaaattttgggttttctaggaacacagctgccaaaccggactgagaacttttgggtttcatctccggtggcttctgattctgaaccacgagttttgactttgacttttcatcatcttcacggaaacttccacacgaagttgataacaccaccaactctttcgcaaggtgctctttctcttctgtttcctctttcaccccgcgcgagcacgtgtaaggggagagccatttcgcggtgacgtattcgactttttccacggcggaacgtgcatgccccttt

SEQ ID NO: 22026 - DNA, 362 bp, Glycine max
  Clone ID: jC-gmro02800042d11d1
gggttaccgttcttgggggtatcaacacggcactggggcgggattttttatccatttctccgggaaaaaaaatttccccggaaaaaattttaaattcaatcttttttttttttttttccaatgggaccaatccccttactcgactttttatatttaaagggattagggtttttacttcaacgatactattgttccgccccattatggaaaaaaattctggtaaaatatgcacttcctcgggaatgaaaaaaaattgatctactttaattggggattttgccttaaattctttaactccttggtactcaattaaaaaatccttttttttaaaaagggaatttatacctataggcctatattta

SEQ ID NO: 22027 - DNA, 595 bp, Glycine max
  Clone ID: jC-gmro02800042e03d1
acaaacgaaaactcaatttaatatttgcctctcatcaataaacaactgaaacagataaatagcttgactcaatcaaaagtacttactgcccaaattatatatataataaagaagtacaataaggcagaggcataggcacaacacccccttgaagctaacactaacaaacaccattcatcttgtcattggtcttcttcctctccaacacaaacttcttccaaatggcagtgatttccctctgagtctccataggattcttcttagcaaccactaccttgccattttcttctgcactgagtgtcacagtggtgctgctgatgacccttgcaggaagtgaatcaagctcatgcagcaccttctccacatcggacacgagacgctccgcgagggtccttgagaagtcctccctgatgacaacacgaagcactgtgacatgttgagcatctgggggcatggtgtatgctggcactatccacccaaagcgccttaaaaagtctgagatttggaattcgtcaaagtgggtgtggtctttcagtgtgaaagccaccaaaggcacaccattgtctttggacacaaatgaaaatcggcctgtttt

SEQ ID NO: 22028 - DNA, 524 bp, Glycine max
  Clone ID: jC-gmro02800042e04d1
cagaaggaaaaaaaattgtattaggatgtcttgggaaataatttcttggacaataatgctacagggtttggttgctaaaatcgtctgagatatcaaacactaaatatgtttagacccgcacaaacggctaaaaaataagatgatcgagatcatcacatgtctactctagcgctcctgtggctcattactgctgagcgcactgcactctctgagcaccaccatgcatatcctcatcctcatcatatgcctcctgctgagcttgttgcctcctccttggctcttcctccatgtgcacatcatggagtgtggtctcctcacactcatccagctccatgtctgacaactgtgatgttggctttgatggcagaacagcctccaaagccttcacctgatcaagactcagggtatcaggaaattccactgagaaatgaatgtaaagctttccctttaggaagcgcctctggtagttaggcattccctcatcatttattgccttgaatgactcaggcttaacaaccttccca

SEQ ID NO: 22029 - DNA, 493 bp, Glycine max
  Clone ID: jC-gmro02800042e05d1
gatggaaattttaatatttatatattttgagaaattgcagagggaaccatgagatactctgaataagagtcctcagttgcaaaaaaaaaaagcaaccaagcaaaagcacgtttgctttcggttataacgtgtatttacataacgggccggttatatatcttcatcatcacaaaatggtcaacaaatccgagcatcatgtgatccactactcactttgctgctccctcgagggcactttcgtcaaaaaagatgcgtagtagtacctcccagatgcttaaaaaaccaaaaaaacaataattgcgaaaaaaacagaactccctgcatgaatcaggcaacctccgggagaggaggtacgttcaggtcaagatccaggagtatgcggcggttataatcagagtcggagtcgccgcggcggaaatcggcggcggggcgttcgaagccgcaggtcttgcggcgcgagacggcgaccatggtgtccgcacgcgcgaatgcg

SEQ ID NO: 22030 - DNA, 538 bp, Glycine max
  Clone ID: jC-gmro02800042e06d1
aaaagctggaatgtgctaattaatattatatcttgagagctcaaataaataagaatgtacagtacaacagttacagcaaaggccatagagtgggtaacctattaagtggctatataaattaaaagttacaatcgaactctgcttatttctaaaacatttttccccagactttgaccgccattattaacagcttctctaggtgagggttgggtaagaaacaatgggaaaaaagttacctatacaaaaattttatgttcttacttgttaactatcagcaagcacaatgaaatacagaattgttaaagcatcttgcttttgttgtaatctttctcacacctgtttcattatgagagtatcctccaataacaggagataagtggattctgtccattatatttattttaggggcctcaagaattgccttgggccgatttattgcatattgcatgccccaaatagctaggggcctcatatacataagggacctgtagtgcccatccattgtccatgcctctggtgtctgaaaccagtacccata

SEQ ID NO: 22031 - DNA, 387 bp, Glycine max
  Clone ID: jC-gmro02800042e07d1
ggaaaggaaagggaataaaaacatacctttgttttattaggggaaaccctttttcggcttgggtggggcctataactaaaaataatggggggctaaggaaaggtcaaccggcttttttccgggaaagccccaattttataagggaaacaaaaaaaaaaacccctggccaacccaaagggggagttgggtacaaacattacccccccggacttaaaaaaaacattcacaattggggggtcccaccaggaaaattttttattcccccccggattggcccccccgaaaagaggggggtatgcccccaatgggaccgtttaaggcccacccctcagcaaaaatgggggggagttttcttccccaaaaagcttggggtggtgagcatttgtt

SEQ ID NO: 22032 - DNA, 550 bp, Glycine max
  Clone ID: jC-gmro02800042e09d1
gatcctgcctgcacagggaatatgcatattgattactgatgatttatgcatataatctttggaagctgttagtaaagcagaaacctaatgataatcatacacaaaaatagctatggcctatagcaacaagtgcgaacgaggaaagcaaggggctatatgcctttagtattcacattgatggaggctatagaccccaagtatgtatatgtcaagggatgacatttcccaacaagctgtttgatgaaggtgagctgtgtccacttgaccaaggaattggatcatgcactgatacaggggagctgtccttcacctccatagattgcaaaaagctctccgtcttctgcggaacaatcaatctctcactcccttggccttgccgagcttttttgataccacccagtgacttctcacttccatgacgaggtgatgaactagtggacccaatcggtgaagccgtgagagtttcctccatagatgcccatccactgcgtttaatgtgttctagctcttctgctacttccatcataataggcctcatgtcactatgaaa

SEQ ID NO: 22033 - DNA, 517 bp, Glycine max
  Clone ID: jC-gmro02800042f04d1
aacttaaactatgtattaaattaaataaaatcaacaacactaagtaaatgggatacaatacaatacaaccttacaaatacaaacaatcaatgcctaattactagtaattcctaatattatcggttggttgcctgactagtgtgactactgcctagcactagcactaactaaatatcatacaaaaaccgaaccggttcaaaccgggtttgtattcctaaactgcaaatttttccctagactctaataaaatatcagcaggtgggaaccatttgagtctgggccaagccggtatccggttcagccacctctttcctcttccgaatctctaacactttacggtgactattggagtgaatatcgctgcagaaggtgggactacacgccggtctatactccgaaaataaccgacctgacttgtaccgaaccccgcacgcgttgcaaagggttttggcgcccagtgggccggtcctccactgcggcgtcttctgcacctggcagtgactgcaccgccgctgaa

SEQ ID NO: 22034 - DNA, 550 bp, Glycine max
  unsure at all n locations
  Clone ID: jC-gmro02800042f05d1
agagcagaaaaggcatttatatatattacataacttatataagtgatttctatgtcttgattatttggtagcttacatcatccccaaatgcaggcaaaattttgaatagcctataaaagcgtgatgcctatgtatgtcttaatcacatgaataatcatcatcccaaaaatgagaatcaaaagaaggaaattagatgaaaagaaaacatgtaatgctacaaaatgaagttgttttactttactgcttcacaccttaggacgtgcttcgatcccttgaagcagcagataataatttataagaaaatgaaaatgcaatggttatcctattctgtgtccctaaagctttcactagtcagccacattttcttctggatgataaaaacaacttcgtcaccatcttggacagagtcagaactggaatcaattgcttcccagtgcaaagcacttaggtacttctttataaaatcaatcactggctgtttatctcggatgatcacganaccagtaggtcgaagcatgcgatccatctcaattaatagatcctctggact

SEQ ID NO: 22035 - DNA, 535 bp, Glycine max
  Clone ID: jC-gmro02800042f06d1
ggctcaaatacttgaattatcaggtcaaacaacaatacaatgcttcaaatgcaaacacaacacttcaattttacttaagtgtacacatgtagaattgtagatggatcaaacaagttgtgtcattctattatgacaaactagaacacaagtttgctaacgcatcagaaaaataaatttatttgaaaaaataaatcaattgtgacaaattaattattatgacaacaagatggtgatttggtagtaatacaaagaaatggtagacgaatttgtaaagaatgggaccaagttggtccctacatagctaggttgttgataaacatctttgttatgagggatttgattctcatagagatcacctggttgtcctgcctgcagctttgccacaaagaagagcattcttgggaattggatattcatccctaatggatccaactggtgaatacactctcaaatagaattgttgtccaaggtattggcgtgcccaaaattcactcctcatgttccacatacccacattatctaatgccatgtaaat

SEQ ID NO: 22036 - DNA, 504 bp, Glycine max
  Clone ID: jC-gmro02800042f08d1
gcggcacccaccatgaaagccggcaagttgccaccaccaaacaaagcatcccaaggaccacttaatgtagacaccaccatctgtggcaccacaattgcaagattgaggactcccaaagataaaccttggcctgctcctgaagcgctgcagtatattgatgctagagcaaatggaacactgaaagtaatcgcaagaggaactccgagaaccccaaagaaaaccatggacccaaccaccaccccttcggaggggtgacccacggcggcgggattcatcttgcgctggtgctccgccaccttggtgatcaccaccgtcattccgaacccaattgccagaataaagttcacaatcgcccacagcctcttcactcccccaaccatcttccccaacggctccaccgccagcgacatgaagcccaaaacgacggcgtttaccatcagccctagcgacccaacgcgcactccattggcgtacgcgttctcccccacttgaccaccgtacacc

SEQ ID NO: 22037 - DNA, 500 bp, Glycine max
  Clone ID: jC-gmro02800042f09d1
agaaaagaccatttagcatatttatataaaatctaaacatattcaagtcaattatacagcatgcacaaaaggaggcaatgtgacaatgtacacactttctgaataaaccaactggttgaatttaacccccaaaccttatcttgccatttcatgtggggggaacattttctgaataaaatccaggaagcgacgcgagtagaatgttgggtccaccgccgagatagataatgaatcaaactgaatagatttgtatgcatgttcaatcttcttagtcatgttgtactcttgcaatatgtcaattataccaaggtaaagtacaacatcgtaagcctcatggaacatttgaacttcctcttttccaggaatctgctctgccctagcaggcatgttcacacctagctggatttgtagtcttgctgtaccgggtagaggtagatccaccttctcatcctcagcagcttgaaatctgctacccctaatgtgtgaccctacaacaacac

SEQ ID NO: 22038 - DNA, 580 bp, Glycine max
  Clone ID: jC-gmro02800042f10d1
gagaaagcacagattgctaaaggcccagaatctcattttgcatcaatagggaagatattttcagcaagaaaggagaataagagtgagtcatcagaaacataataaattccgatttatggttccacagaataatttatggagatagtgatgactacacactagtcaaagacaaacatcatgaaaggacagagagatcctagatttctaagataaaacccagatgagagtagattaagaggaaacaaaaggaaaggaactataatttctacataaaaaaccagcaatggatcctcaggcacggtcttgttagccactgttgtggaagaagcaggtgtcaagctgaaaaacactagagaacattgtctctccaggaccaacctaacagaataaggaggaacaagaacatacttcaagaattaaacttttcaccttcaataccccgggaaagaatttcaataattcaggttgccattataaaagcctggatcaagttttcagcagcacgctttttgttcaagtgtgcctgatataagagcaatacgatcaccacgagcagatttgttgtcagatatctcaaatg

SEQ ID NO: 22039 - DNA, 482 bp, Glycine max
  Clone ID: jC-gmro02800042g04d1
cccactaaggaataattattttaaaaaaagtcttcacacaacaaaggagtaaggtaaaagatttgagctcttctacccctaatatttaagacttttgcccaaaagaacatcacgaaccatgttgtccaaattagcaaatgaagatccaacagagcgaaaagcagcactttctgccaattccttccattgcaaagcttttttcttcatctttttacccttttccccatccatcaactccctcacaagggtctctattttttccctctcaacatcttcaatctccaacccaatcccccaatccttgcaacaaaaccgacaattggtctgttgctctgcaaagaaaggccaacaaatcattggaacacctccacacatactttccaacgttgaattccaaccactgtgtgtcaaaaatcccccaactgaagggtgagccaacacttgctcctgtgagcaccaactaaacaataggcctctatttt

SEQ ID NO: 22040 - DNA, 482 bp, Glycine max
  Clone ID: jC-gmro02800042g05d1
ccaggaattagggacattaaatttttttgttgggtcttaaagtaaaaatcacatttatttttatataaaagggggttgtccaagaagattaaaaaaaatacttgctttttcgaaggggataactaaacaaaaaatgggaaaaaggaatggcttcaaactgggaagccaatccatccccgtttaaatcgaaattccaagaaagcccttttgtaaactcaaatcttgcctccctggaattggaaagatgatgacagtttcctgaaaagcccatccgggttatcagaatgcacccaggggccagcattttcaaggacatgcattttaactccaccttttttctaaaaagaaagcttttaagttgcatggatccgctgaagattttcaagaccccatctattgaagcttttttttgttttaaaaaagttcacatgcaccccacgagggacatttccaacaattttccacagatttgttttttcaaa

SEQ ID NO: 22041 - DNA, 501 bp, Glycine max
  unsure at all n locations
  Clone ID: jC-gmro02800042g06d1
aacacactcaaacataacggatattattagaactccaaagccaaagacctgacattaagcttagaccaacagttcataaagctcaagacttcacatcacagtaatagtctaaacacactggaaggaaggtataatacgtcaacccgttatttagtaggtaattatgggatgactttgattcacacagcacgcactggcattttgattactcatcatcataactcttgtattggtgatgcttgtggtgatgcttctttctcccatcatcatcatctgagtcatctccatatttcttacgaccatagccctcatcatcatcatcatcagccttcctctcataggagggcttgcggaacccctcctcctcctcctgccggggtggacgcccctcataaccatactcaacccttcctcctcctncttggctctcatagttgctcctcccatagctagggttcttcttatactcactcctccctccatacccggatccatattcac

SEQ ID NO: 22042 - DNA, 519 bp, Glycine max
  Clone ID: jC-gmro02800042g07d1
atcaataaattcttatcatgaagttattatatgaataagtcatctaaagatttctatgtcgaacaatttgaacaaactctacattaattgtagacatttactataaatgtgagcccctgctttgtttaaaggggattggttacatgaaactatggtgcttaattgaagataagccatgcattgcatacaccgaattacatcacacaggtacaaagttacaacgtcattcactcattcaaggcttaattctccactgtgttggagtcttatatgtgggcagggtgtttcaggttctccacttgtccacaaaaccctcaaatctcctcgcttccgccccaatgtcatcagggtcccaagggtaaatggaacgatgtatagtagtgccggttggccatgcccgtccatcaagtttagtgccacgtacgtaattaaaaggccaaagccatatgcaaccattgcccacaagaaatatccactttaaggctcttatttgccagccaatcgtacctgagtgagaat

SEQ ID NO: 22043 - DNA, 483 bp, Glycine max
  Clone ID: jC-gmro02800042g08d1
agataacacatgtatataccacttatcgatacttgtttgtacatggtcaaggtttatcagtgttccctccctgaaatatcaaaaagcagacaatctaacattaaacataaattctaattttaactcccttcccccaataaagatctatccccgcaatatccatcaattcaaggatcttccaataataagcttcagcttgaatcaaattagttgaattatttggctgcatctattttctctctgcagcaatgtaactccaagtgatcctggaaaataatcagcaaagctatatgtatatataaaaaaaatcttttcctctctttttcatatttatcctttcaacactatcatgcatcatttgtttggtatctatacaccaggacttgaaaactagtccattaggacaagcaacatattacatcaccattgggatgaattcactctccgaagcattggttttggtttacgtttttcctcaactgg

SEQ ID NO: 22044 - DNA, 403 bp, Glycine max
  Clone ID: jC-gmro02800042h03d1
ccattaattatatattttttaaggcaaaaaacttaatattattttattcaaaatgaaagactgaatacaaattgaaatgaaatcaaaatgccggagactaattaacctaagatctaaataccctaacaagtgaatgaaccacttaatttgtttgtctgaggataaactcaactgaagagttttgaatgttatgaacattattattcaaaaagccatatggagattaaaattaaagggcatgcatggccttagctagttacttaattttgtctcagttgttccattaaagaaaggataatctgtgtagcctataacaggatcttgggtgtaaaatgtgttcctgttatacttggtaagaggtgcattgagcttaagccttaaaaccaaatctggattggagatg

SEQ ID NO: 22045 - DNA, 551 bp, Glycine max
  Clone ID: jC-gmro02800042h07d1
cctaacggattaagtatcgtatatattgtagctggcacaatgactagatgccatatagttacagtattagtttatgaattgtcctagcaggaaaaagcaggaaaacaaaatccaaaggctaaagagtaggctatataaactacattttggcaaaggtgcttccaaccgtacactaagggttgagaagcaagggtaataatattaaacatgatagaagaagtacagactattagtagtctaaagaccccacagttgttatcccagtgcttaaatttcttgggtcttgacggctcacatagtcatcacagatgccattagagagcctttgatttggaaccgagttcaacagctcaaggccattgttgcccatttgctgcacttcctgaggagaaagtatctttatgcaccatacactatttacgaattccggccaggggccatcaccaaggagaagaacatcattctctcggtctacaaatacaagctgccagcctgatctcacagggtccttcaactcgcctttcaggccaaacatttgagcgagttcacca

SEQ ID NO: 22046 - DNA, 513 bp, Glycine max
  Clone ID: jC-gmro02800042h09d1
ccatcatatcattcattcagaatcactttccatgcttcccatagccttcaaccctcttggtctcttcttgttacttttcttctccctaacttcatatctctcttggcacatatcagtcaaccacgccccgggactcaccaaaagtaagcttctttgaatgattttggccctctttttgggtcgctgaggaagcttgcaacccttcatggccagaaaatcttcctctttctccttgcttgagagagtgatgtagagcttgggccaaactagggctcgttcttcgccgttgatgccttcgccgccggtgaccttgccgttctcttccgccgaaccccgcgtcgtgtagtaccggtcctccttctccggcgacgccgatttccttgtctcgccggccgatgaccggagaatcgccccgtcggaattccttgtaaggcgattaagttgttgatgatgatgatggtgatgatgttcttttttctgcacagtgaggccagagcgatgatgctccattgc

SEQ ID NO: 22047 - DNA, 252 bp, Glycine max
  Clone ID: 700966868H1
agctttcattgctcctagcaattcacaacaacccttcttttttagctttcacgaaactttccaacaatgaattcctcaaaggcatgcacccttttgaatttggtagcggttgttatgttcgttgcattttgattagccaaagtagggtggaggctagggttttatctcattcggaggaatttgcatttgcaagagctaataatctccaaacatacacctcatcagcctatgagcaagccaagaaaaccatgg

SEQ ID NO: 22048 - DNA, 253 bp, Glycine max
  Clone ID: 700966851H1
gcaatttggacctccaaaccaacctgaagtcagtattcttgactaccagtctcaacagcataagcttatgccaatgctggcttcaacttatgcttttcattttgccacgacaaatctagtggagaatactctcaaatgaaaaaaactcatgatgatgaattagttgcagatgtccatgccctttcggcaggtctaaaggcttatgtaacatcatacactgcaaagtcactcagcatctgtagggaagcctgtg

SEQ ID NO: 22049 - DNA, 252 bp, Glycine max
  Clone ID: 700966857H1
ccacaacccacaagtctttacgaggtccaagaggtggtatgatattcttcaagaaagatactgtgcatggggttgatttggagcctgccattaacaatgctgtttttcctggtctacaggggggtctcataaccacacaattggaggactagcagtttgcttgaagtatgctcagtctccagaatttaaaaattatcaaaatcaggtggttgctaactgtagagctcttgctaagcgattaattgagcatgg

SEQ ID NO: 22050 - DNA, 256 bp, Glycine max
  Clone ID: 700966803H1
gttcattcattcatattttccactccctctttcgccactctcgaaatccgtgcactgatactcagagacaaagatgaaagagagaaggaagtgaaacgcaggacagccttgccgtttttgaaaggccgtaaacgacgaagcaaaacgcgttcgtaacagaagaaagaaagaaaagagtaactgacaactgtaccagtagaaaaatcatcgacggtatgctcatgactgtcactgcttcgtcgtttatttttttgtt

SEQ ID NO: 22051 - DNA, 145 bp, Glycine max
  Clone ID: 700966815H1
attgggtggtccatcatggacaatagggttagggagaagagattcaaccactgcaagtaaagatgctgccactagtgatatcccatcccctctaatggatctcaatgatctcatatctgccttttcaacaaggggtttacctccc

SEQ ID NO: 22052 - DNA, 255 bp, Glycine max
  Clone ID: 700966816H1
gtaacactagaactcacaaaggacagaagaaacgcgaatgccaggagaactccaattaccacccgggttcagattccaccccactgacgatgagcttgtgaatcactacttgtgtagaaagtgtgctgcacaaaccattgctgttcccatcatcaaagaaatcgatttgtacaagtttgatccatggcagcttccagagatggctctttacggtgagaaagagtggtactttttctctcctcgagaccgaaaata

SEQ ID NO: 22053 - DNA, 264 bp, Glycine max
  Clone ID: 700966774H1
aacaccccaagtttgctatcactaagagtgtgaactatcttccaaatgtgctctcaaaggtggaagctgaagaagctggtgcttttgtaggcatttggcttgatggtgaaggttttgttgctgaagggcctaatatgaatgtggcctttgtcactaaagataaggaacttataatgccacactttgacaaaattctaagtggctgcacagctaagagagttttaacccttgctgagagcttgttaagggagggtaagcttaaag

SEQ ID NO: 22054 - DNA, 263 bp, Glycine max
  Clone ID: 700966776H1
atttttcagcaccccaccaaggttttgtccgaaaagcttgaatttttcgcctaccctttacaatgatctcttcattgagacaacctgttgtagggatcagtggttctgatcttcttttgaggcaaagacatgcaaccctaattaaggcaaggtcctttttaccctctttgtcaagagaaaagggtcaaagatctcttgtttcagttcaaaagccacttcacattgctgcttctcttggtgttggaaattttgtgtcagtgaag

SEQ ID NO: 22055 - DNA, 260 bp, Glycine max
  Clone ID: 700966785H1
caatttctctctttttgctcagtttctgttgtattttctcaattacaacatcgtattctgcaaattcaaaccgggtcttggttttctgaaagatgggaggtggcaaggacaagcatcatgatgaatctgacaaaggaattttttcacaccttgctcatggggtagctggtgcagcacatggtggacatgggtacccacctggggcttacccaccaccacctggggcataccctccacaacaaggatatcctccagctggg

SEQ ID NO: 22056 - DNA, 261 bp, Glycine max
  Clone ID: 700966787H1
gaaatggaggacccggaaccgtcaagaagataacagctagtgaaggtgaccaaaccagtttcgtgctgcaaaaagtggatgcaattgacgaggctaacttggtatacgactacagcatagtgggagggacggggttgcatgaaagtttggagaaggttacattccaaacaaaggtggttcctggcactgatggtaatggctctatcgccaaggccactctcacattccacaccaaagacgatgcaccactctcagatgcag

SEQ ID NO: 22057 - DNA, 262 bp, Glycine max
  Clone ID: 700966792H1
aaaagattgaaaaagtaaaccgtgaaaggaaatatcatcagcaaaacactgcatatgagcttaatgcgttgtccatgcaatggaaggagctttgtcagaagaatatagacatcagtgctgcctgtgcttcagttgaaaatcgcataaatgaattgaaaagaggagcagcagaaagaggctggaacttggaagctgtaactgaaaatggccaattggcaaaatccgaattatgagattcgtatgttctcatctagttttgtat

SEQ ID NO: 22058 - DNA, 263 bp, Glycine max
  Clone ID: 700966739H1
gcgttgactacgtccctgccctttgtacacaccgcccgtcgctcctaccgattgaatggtccggtgaagtgttcggattgcggcgacgtgagcggttcgctgcccgcgacgttgtgagaagtccactgaaccttatcacttagagaatctgaggagaaagtgactggtctggaatcgagtattcttcaattgcgcaaggaagcaaaggaagctgagagggtgatcatatcgctgaatgagaaggcggtggagaccgttgagtc

SEQ ID NO: 22059 - DNA, 264 bp, Glycine max
  Clone ID: 700966745H1
tttccattttccaaagcctaattgatcgtgctcgaaggaccgtgcgaggatctgcagatgatataggatggcttcaacgtgatcctggaatgcctccggttgaagatggaacagagaggttcctggaaattctggacaacatcaagcatggtgttcacaagttaccaaattcggtggtttatttgttaattccaggtcttttcagtaatcatggtccactttactttgtcagtacaaaagtcagtttttcaaaaatgggtttgg

SEQ ID NO: 22060 - DNA, 109 bp, Glycine max
  Clone ID: 700966748H1
attctctcttttttacgtacatgaaattaataaaggaactttcgcgagagacccaacacaaaagcaatcaaatcatagattgatttggcaaccccaattcccttttttg

SEQ ID NO: 22061 - DNA, 262 bp, Glycine max
  Clone ID: 700966752H1
catcagtccttctgaactcaacaaccaatcaggctgagaagaatgctcctccaaatctcacagtaagaggctttgacttcattgacagaataaagagccttgttgaagctgaatgccctggtgtggtctcttgtgctgatatcctcactttggctgccagagacactattgtagccacaggtggacctttttggaaagttccaactggtcgaagggatggggtcgtctctaacttgacggaagccagaaataacattcctgc

SEQ ID NO: 22062 - DNA, 263 bp, Glycine max
  Clone ID: 700966753H1
gttcggttcagcaacaatgttatcggactccttaacttcctcaccttcctcttgtccatcccgatcctggtggccggagtgtggctgagcaagcaaggcgccaccgagtgcgagcggtggctggagaagcccgtcatcgcgctcggcgtcttcctcatgctcgtctcactcgccggcctcgtcggcgcgtgctgccgcgtgtcgtggctcctctggctctacctcctcgtcatgtttgtcctcatcgttcttctcttcgcctt

SEQ ID NO: 22063 - DNA, 261 bp, Glycine max
  Clone ID: 700966754H1
gcttgccaagctaggcataaggcccttctcatatgggcttgtggttctctctgtttatgataatggttcagtgttcagccctgaggttcttgatcttactgaggatgacctcattgggaagtttgctgctggtgtctcaatggttacttcactttcattggctatttcatatccaacacttgctgcagcaccacacatgtttgtcaatgcctacaagaatgttcttgctgttgcggttgagacagattattctttcccgga

SEQ ID NO: 22064 - DNA, 266 bp, Glycine max
  Clone ID: 700966763H1
ctagaatgttcaaaattcagcaatttggttattcttgtcccctaaaggccaacatcgaatcttccatcttgcacacaacgctcctgcacgatcctgtcactaagtttcttgtgtgaataaaaagggagaggaagggagaataaaggataaatcctttgtttcttaatcttcattcaaaagttatgggagtctagttcagctggttgaaaaccctaattctctttgactactaactagtgtcagacagagcatccaaactttggaat

SEQ ID NO: 22065 - DNA, 266 bp, Glycine max
  Clone ID: 700966735H1
gatatttacgtctacggcacgccaacgttggagtttccggggctgattaaggttggtgtgcacgggggggagccgtgcgacccggataagaggccgtggggagcagcggtgatgatggaaaaactcaaagaatgggtggagtttacgttcaaggggatggttgaatccactgagcccgtcatcaaacagtcttgcatctactccatgacgccagatgaggatttcctcattgatttcttgggtggggactttgggaaggatgtggt

SEQ ID NO: 22066 - DNA, 266 bp, Glycine max
  Clone ID: 700966708H1
agccaccctgacgttgctgctgaggaaccatggtatggtattgagcaagaatataccttgttgcagaaagatgtaaattggccacttgggtggccacttggtgggtttcctggaccacagggcccatactactgtggaactggtgctgataaagcatatggccgtgatattgtagatgcacattacaaagcttgtatttatgctggcatcaatattagtggcatcaatggagaggttatgcctggtcagtgggaatttcaagttgg

SEQ ID NO: 22067 - DNA, 268 bp, Glycine max
  Clone ID: 700966711H1
aaaccggggtgcacaaggaaattgatgttcggaagctagatgtgaatgataggcaacaaatcattgacaaaattttcagggttgctgaagaagataatgaaaagttcctcaaaaagttcagaaacagaattgacaaggttggaatccgacttccaacagtagaagtgaggttccaaaatttgactgttgaagcagattcctatgtcggcagcagagctctaccaaccctaccaaatgttgcattaaaccttcttgaatcagctcttgg

SEQ ID NO: 22068 - DNA, 265 bp, Glycine max
  Clone ID: 700966712H1
tacaaattctctgtgttgtgttgtgtacttgtgttaattgtgttgttgttgtaggaaatttaagtgaagagagaatgatgatgaagtctgctatgtgtgcattggtgcttgtggcactggttgtggttgaagtggggcccatggctgaggctgcggtgacttgcaacccaacacagttgactccttgtcttccggcaattaattcaggttctgcaccttcgagtgcttgttgccagaagctgaaggagcaaaagccatgcttctg

SEQ ID NO: 22069 - DNA, 270 bp, Glycine max
  Clone ID: 700966718H1
gctgattacaacatccaaaaagaatctaccctccacttggttctccgccttcgtggtgggatgcaaatctttgtcaagactctcactggaaagaccatcacccttgaggtggagagctctgacactattgacaatgtcaaagccaagattcaggacaaagaaggtatcccaccagaccaacagaggctcatttttgctggcaaacagcttgaagatggccgaaccttggctgattacaacatccaaaaagaatctaccctccacttggtg

SEQ ID NO: 22070 - DNA, 265 bp, Glycine max
  Clone ID: 700966720H1
ctccgtagatcttaggaatgcatcccaaagatctctagcttctcacttgaattcaccacgttccatgggatacccgtctttgtcatctcttaactcgcggtacatgtctccacacattccaagtccaagcaatgcttcggtgagctatatgggctcatccagtcatcaacaacatcctctccgctatagtgagtcagctgcaagcttctccccatttgcatcgacacactcccttccggaatgttaaattgttcaattgattata

SEQ ID NO: 22071 - DNA, 265 bp, Glycine max
  Clone ID: 700966721H1
cagttttggagtacttgtgttggagatggtctcaggtagacgccccacagatgtactcagccatgaaggctcaagcttgtgtgagtggattaaaaagcaatacacacaccaacaccaacttgaaaactttgttgaacaagcactgcaaaggttctctccttgtggcgtgccaaaccatcgtaacaaaatttggaaagatgttatactagaactcattgagctggggctagtatgcacacagtacaatccttcaacaagaccaagc

SEQ ID NO: 22072 - DNA, 266 bp, Glycine max
  Clone ID: 700966724H1
ctatactctctctagagtaattgcggaatcagctagaattttctaataatggccaaagacgttgagcaggttacagagcaaggtgaatactccgcgaaggattaccatgacccacctccggcgccgttgatcgacccagatgagctcactaagtggtccttgtacagagccgccatagctgagttcatagcaacactccttttcctttacatcaccgtgttgaccattattggctacaagagacagagtgacaccaaaatccccgg

SEQ ID NO: 22073 - DNA, 265 bp, Glycine max
  Clone ID: 700966728H1
gaaaggtgttgttctcagatccatccatcagtggtgggcgatgttgttgttctcagatccagactgagggggtgaaggaaaatgaagtcgtcgaggcgtctgttgaggatcgggcttgtgtcggcgtggtactcgtcgaacattggggtgctgctcctgaacaagtacctccttagcaactatggcttcaagtaccctatcttcctcaccatgtgtcacatgaccgcttgctccctcttcagctacgtcgccatcgcctggctca

SEQ ID NO: 22074 - DNA, 267 bp, Glycine max
  Clone ID: 700966731H1
gaaaacttgatctgcctttgctttgttatttcattaacagcacccctttgggccatatattggttacctcaactgcttttctgttcatctttccagaattattgtaaagttccctttttttgttctgtcttttcattcttttttcaaagtgaattcctgggattttttgttttcaattgagggcactaaaaaaaaagaactgactggaatttccatttgtcttgctgggtccctgagatttgaagtgtgttgttttccttttggtgg

SEQ ID NO: 22075 - DNA, 269 bp, Glycine max
  Clone ID: 700966734H1
gcagacagtaaggttggtaatggataggtttgaggtcaagatgctgatgaaagtttactgaacttgtttgaggagctaaacatttccatattgtgctttttatgtcccaagtatggaatcatttatgttttacatgacattgtttatatgggaaaccaattctgctgtgatatctgaaataacttatacagtggatttttctctcttgttatgaagattttgttttcatttattaataattattgccagctatttgatcatgataagtt

SEQ ID NO: 22076 - DNA, 267 bp, Glycine max
  Clone ID: 700966704H1
cggagttctaaatttccggcgagtttccctctctcgaatctgcgacaccgacgaatctcactaagcggaacttcgcattcagaaaatggctttaggtggaacagctcccccgagaggaagtgcagcagctactgccagcatgaggagaaggagaacaaccggtggtgcggcctctggaggagcagctggaactatgctccaattttacactgatgatgcccctggactcaagatctccccaaatgtggttcttgtaatgagcattgg

SEQ ID NO: 22077 - DNA, 261 bp, Glycine max
  Clone ID: 701103662H1
atttgatggccacttaggccatgatgtagcaagctatttgcagaaccaccttttccaaaacatcttgcaacagcatgacttttggactgagacagaaagcgcagtgaaaaaagcttacgttgaaacagatgagaaatattggaacaagaacttgtgttggggcgaggagggtcaacagctgtgactgcaatacttattgatggtcagaagcttgtagtagcaaatgttggtgactcaagagctattatctgtgagaatgga

SEQ ID NO: 22078 - DNA, 239 bp, Glycine max
  Clone ID: 701103588H1
ccctagttcgcttgcagtcacacaagaggccaatcctattcatagctcgagatgggtgaagaagtgaaggtagttgttccagaatcagtgttgaagaagcgcaagagggaggaggaatgggcgttggccaagaagcaagaactcgatgctgccaagaagaagagagccgagagccgcaaactcatctacaacagagctaagcagtacgctaaggagtacgatcaccaggagaaggaatt

SEQ ID NO: 22079 - DNA, 237 bp, Glycine max
  Clone ID: 701103593H1
ccggcggcaccctccgaagacggagatacacccactcactcaccaccactttcccagaaaataaccaccgcctacaatttctcggaatttattttgcggtgagggagctcgtgtcgtgtgtcgtttagggttaaaaatggggtttaagtgggtgcactgatgtcattgttgtggcttgtgattcgtcaacttgcagaaatcgaggcaatggctgcatctaagaaactgataacaaga

SEQ ID NO: 22080 - DNA, 241 bp, Glycine max
  Clone ID: 701103581H1
ctactaacccgacctcccgaacagcagcacaaatctccgcgaggcatctcagcccagaggtttggtcccacgacgctgaacgttcgcccttttccattccttcgtcgacactccggttccggcacgaagaaatcaccatgtcctccttcgagcaggtggtcgtcatcgacggcaagggccatctccttggccgtctggcctccatcgtggccaagcagctcctcaacggccagaagatcgt

SEQ ID NO: 22081 - DNA, 240 bp, Glycine max
  Clone ID: 701103559H1
ggctatctaaggttccggagggtgtagacaacaacaggggcaatgtttacattggcagtacaagcccgacaaatgttgcaagagcttactatgagcaatttcaaagagatttctctctttttctcaagtgtcgtgcagaggaattagttaaaggaggtcgtatggttctaacatttttgggaagaagaagcgatgatccctctagcaaagatggtggctacgtttgggagcttatggcta

SEQ ID NO: 22082 - DNA, 238 bp, Glycine max
  Clone ID: 701103576H1
gtcttcttggctctctgtttagggttgagtatgaagttgaatattgcagcactggccaaaagaatggtaatggctgtcttgatgggaagagaacaagcctcccaatacaaaagggtggttatgtcatatatggggttgctcatcagcattcaggtggcactggatcaactctatatggacaggatggaagggttatatgttcctcaataccgagttatggaaagggaaaggaagcagg

SEQ ID NO: 22083 - DNA, 243 bp, Glycine max
  Clone ID: 701103531H1
cttcattcctcttactctcacaccctcaattccaccgtcacttccctctctacgattgcacactcggcacgtggcgcaatttctctctctcactctctgattcattccactcttttccttctttcagcactcttatctcctctggtggtctcttttgcctatcagattccacatcatgttccttgctcgtgtgcaaccttttggccaagtcctctagaaagattcaatacccaagtttctctc

SEQ ID NO: 22084 - DNA, 242 bp, Glycine max
  Clone ID: 701103538H1
gaagaagctcagatcggaaaaattcacctctccaatcccaatcccatcgttgcaaatgatccgattcattctgttgcagaacaggcagggcaagacccgtcttgccaaatactacgttcctctcgaggactccgagaagcacaaggtcgaatacgaggttcatcggctcgtcgtaaacagagaccctaaatacacaaatttcgtcgagtttcgtacgcacaagataatatacaggcgatatg

SEQ ID NO: 22085 - DNA, 241 bp, Glycine max
  Clone ID: 701103543H1
tagaatcccctccaatccctctttgtctttgtgcttttctttagttctttccaaaacagcaacaatgatgagttgccaagcatggcctgaacccatagttcgagtccaatccttagctgacagtggcctaagctcaatcccttcacgctatattaggccacactcccaaagaccctccaacaccatgatcatgttaacatccccgttattgacctggaacatcttttctcggaggatgaaa

SEQ ID NO: 22086 - DNA, 241 bp, Glycine max
  Clone ID: 701103546H1
agcttgcacctattggtatcttctacaatatcctaaagtgtttttcttcttcttcatcaccatgtctttactttcagacctcatcaacctcaatctctcagaatccacagaaaagatcattgctgagtacatatgggttggtggatctggtatggacctcagaagcaaagccaggactcttcctgggccagtgagtgaccctgcaaaacttccgaagtggaactatgatgggtctagcaca

SEQ ID NO: 22087 - DNA, 243 bp, Glycine max
  Clone ID: 701103549H1
caagaacaagatcaatggaaaaagttcgcaggatcgccttgtatctggatcaagatgttgataggttcttcccttcacacttgaaaagacaccaccatttaaggtctcttctttgctaccatgaaaaggcagttaggctaagtgaatgggggctgatgaagtctttttttaacaaatgtaggttacttagagtgttgaatttggaaggaatacagtgtcagggagggaagttgccaaaagaaa

SEQ ID NO: 22088 - DNA, 258 bp, Glycine max
  Clone ID: 701103490H1
caaacatgtccaccgcaacaactcacgtgctcgcttatcccttccctacctccggtcacgtgatccctctcttagacttcaccaaaaccctagtctctcgcggcgtccatgtcaccgttctggtcacaccctacaacgaagccttacttccaaaaaactattcccctcttctccaaacgcttctcctccccgaacctcagttcccgaacccgaagcaaaacaggctcgtatccatggtaaccttcatgcggcaccacc

SEQ ID NO: 22089 - DNA, 257 bp, Glycine max
  Clone ID: 701103491H1
cgggactttcactagccgcagcagcctcaggaggagaataaggatgtctcacaggaagttcgagcacccaaggcacgggtcactgggatttctccccaggaagcgtgctgctcgtcacaggggaaaagtgaaggcattccccaaggatgacccatccaaggcacccaagctcactgcattcttgggttacaaggctggtatgactcacattgttagagaggtcgagaagccaggatcaaagcttcacaagaaggaaa

SEQ ID NO: 22090 - DNA, 245 bp, Glycine max
  Clone ID: 701103508H1
ctcgctgcttattttgatttgaactttgaagttttgttattttgtgcaatggcagccaagagcaaaatcctagtccttggaggaacaggatacattggaaaattcatagttaaggcaagcgcagaagcaggacaccccacttttgccttagttagagagagcaccctttctcatcctgaaaaatctaaacttattgagagcttcaagacctccggagttactcttctttatggtgatctaactga

SEQ ID NO: 22091 - DNA, 244 bp, Glycine max
  Clone ID: 701103509H1
cagaatcattaaagataagattatattgctaagaagaaaaaatatgaaggttgtctacttgcttgttgccctcttggctttgacatcaactgttgtctctgcctatgaccctagtcctctgcaagatttttgtgtggcagccaaagaaaaagatggtgtatttgtgaacgggaaattctgcaaggaccccaagcttgtcaaagcagaagatttcttcagacatgtggaacctgggaaaactgac

SEQ ID NO: 22092 - DNA, 243 bp, Glycine max
  Clone ID: 701103514H1
caagaacctcgacgatatcgacctttcctttaacaacctctccggccccataccaagctcgcttggtaaactgcctaaactcgcgtatctagatttgagccgcaacaagctcacgggctcaattccggcctcatttggatccttccaaaagcccgggccggctattatgctcactaaaaaccagctttcagggcgccttcctgcttctttggccaacttagactcggacaggatagacttgtc

SEQ ID NO: 22093 - DNA, 263 bp, Glycine max
  Clone ID: 701103462H1
caaaaacaacacattctatatataaaaaaacacacaattccgataacattattcccagccatcgcaagctgcatttggggatggtaatgggacaacagaaaatcgccctcgcccctccctcttcgtccttccgcctccgcagccgcagcctcaactccctccgcctccgccgcatcttcgacatgttcgacaagaacggcgacggcaccatcaccgtcacggagatcagccaggcgctgagcctcctcggcctggacgccgac

SEQ ID NO: 22094 - DNA, 261 bp, Glycine max
  Clone ID: 701103463H1
gttttgttggtgagaatgaagagaacgaacggatccgaaaggcgctgagagaattttttgacctgacgggggcgttcaatgtgtctgatgctcttccttatttgagatggttggatttggatggtgcagagaagaaaatgaaaaagacggcgaaagagttagatgggtttgttcaagtttggctggaagaacacaaaagtaaaaggaatagtgaagctgaacccaaaagtaaccaggacttgatggacgtgcttcttagcc

SEQ ID NO: 22095 - DNA, 260 bp, Glycine max
  Clone ID: 701103476H1
caccagtttacaagcctcctatagagaagccaccagtgtacaagccaccagtgtacaaaccaccagtgtacaaaccaccggtgtacaagccccctgttaagaaacctcctatttacaaaccaccttacccaaagtaccctccaggctccaactgaagacacccacctgattttgaattaagttaagggatgtattaagtatatgctaaataagaggtgtatctacaaccattgactttgtcatgctcaaaaatttagttt

SEQ ID NO: 22096 - DNA, 257 bp, Glycine max
  Clone ID: 701103477H1
gaatgcataaagtttggtggcatctgatcctttttcgatcccaaataacagaagagaatgagagtatcactggtaggtttgattatttaacagaaaaacggttggaaaatgggaggttgctgttgttctgccaggaaacctcacctgcatggaacgccagtgtattactattgcccaccaactttagaagagcatgagtctttaacgtctaatgatggtacggctacgtcactcactactggattgctggtaggctt

SEQ ID NO: 22097 - DNA, 259 bp, Glycine max
  Clone ID: 701103443H1
cgaagcaattgggtcggaggctgttgaggggcacgagcagagtttggccatgaaggtctggaactttgcctgccctgatgcccccggtggaatcgataacccctggatcaacccctgtgttcctggggcaccctctttggccactcttgcctgctctaagttgctcgttactatcactggcaaagacgagttcagagacagagatattctctaccaccacaccgttgagcaaagtggctggcaaggtgaacttcaactc

SEQ ID NO: 22098 - DNA, 255 bp, Glycine max
  Clone ID: 701103404H1
ggtgaacgcttcaaggaattcctgagggaggttgcaataatgaaaggcttacggcatccaaacattgttttacttatgggtgcagtcactaagcctcctaatttatcaattgtcacggaatatttgtcaaggggtagcttgtacaggctgttgcataaacctggcgctacagagatgttggatgagagacgtaggcttagtatggcttatgatgtggctaagggaatgaattatcttcataaacgcaatcctccc

SEQ ID NO: 22099 - DNA, 256 bp, Glycine max
  Clone ID: 701103406H1
ctctttttctctctctacactctattcaacccttcacattttctctcttctttatcttaaattacttttccatggaggaaagcaagaaacgagtccgggacgagtccagctactcacccgagtcccaaactcagctggtcgactctcccgagtctgaaagtcagcgggtcgactcacctgagtctaagattcgtcgagttgactcgtccgagtctcaactcgactcggtccttgactcggaggtgcgtctacaaga

SEQ ID NO: 22100 - DNA, 257 bp, Glycine max
  Clone ID: 701103407H1
cagacacagagcgagagagaatcgtaacagaaacggtcactggaagttgtctctaccaccctctcagccatggcaacaattccccctagccgatcatcatcacacgcgtttgttgccatggcaaccttcacgactctgttgttgtgcacggcggcggcgaaggagagcgtgtacgagatactccccaagtacgggctcccgagtggtctgttaccggataccgtcaccgactacaaactcgacgaggatggccaatt

SEQ ID NO: 22101 - DNA, 258 bp, Glycine max
  Clone ID: 701103408H1
ccgtaatttaattctagctaatttgctaaagtaccagcaaaatgtatcctacagtagatgaacatgatgaggtatatgcagctcatcatagacatccagggtatgttctaccagttgtggtgccaccaaattatggccctcctcaaattccatcctatgctcctccatacatcagcaacagtgttagtgtaaggggtcctgtgattaggacacagcgatggtcaactggtctgtgccgttgtactgatgatcctggaa

SEQ ID NO: 22102 - DNA, 261 bp, Glycine max
  Clone ID: 701103409H1
actttctgttgattaccctgtcgacaaagtttcctgctatgtatcagatgatggttcagctatgttgacctttgaagcactatctgaaacagctgagtttgcgaagaagtgggtgcccttttgcaaaaagcacaatattgaaccaagagccccagagttttattttgcccagaagattgattacttaaaggacaagattcagccctcgtttgtaaaagagcgacgggcaatgaagagagaatatgaagaattcaaagtacg

SEQ ID NO: 22103 - DNA, 263 bp, Glycine max
  Clone ID: 701103411H1
ccttagtttctctcttcacatatcatcatacttagatagtcagatacatcacccaataattaaattaaatacatgctagcactttaacagtactcctttctctaatatctctctcatattttcctttctgcggatattcagctaattaaactaagtcactaagatgactgagggaaagctagttgaagctgcagaagctcataagacacttcaggatttcgatcctccaaagaagcgcaaaaggaacaagtatgcttttgctt

SEQ ID NO: 22104 - DNA, 262 bp, Glycine max
  Clone ID: 701103413H1
cagctaatgagcagtctgttgcaactttcttcagtcaagttatggctaagattgggggaaacactgctggcccaggtgatgctgtcgtcaatgtttacattaatcatgacaagaagtttgcctttgtggagatgaggtctgttgaggaagctagcaatgcgatggctctggatgggattattttcgagggggcacctgttaaggtcaggagacctactgattataatccttccttagctgctaccctaggcccaagccaacc

SEQ ID NO: 22105 - DNA, 257 bp, Glycine max
  Clone ID: 701103424H1
gtggtatttttggaggacaacttagaagtttggtgagagctaaaggaaatagagcttctgctactgttcaaccatatctcttgctccatcttgacatctatcctgatgctgttcacacaattgaggatgcacttcacttgttttctgcaccagagactcttgaagggtaccgaacatcactcactgcaaaggccggtgttgtgactgcaaggaaatctgttcgaatagtgacactcccgaaaataatgatattgcac

SEQ ID NO: 22106 - DNA, 262 bp, Glycine max
  Clone ID: 701103429H1
aaccgacacaaagatctagtcctagctagaatcaaacaggggcgatctcaccttcaagaacacatcgccatggcaaggaacttgcttcttgtgctttttgcagtagccaccctcctccatggctcagcagcccaaaccagacacatgtcggtgatgccacgggctggatcatccctgctggcggcgctgccacctacaccgcctgggcttccaacaaaaccttcaccgtaaacgacactctcgtgttcaacttcgccaccgg

SEQ ID NO: 22107 - DNA, 254 bp, Glycine max
  Clone ID: 701103402H1
tccattctctctgtgtatttccctacctctcccttcaaggttagtcgatttcttctgtttttcttcttcgttctttccatgaattgtgtatgttctttgatcaatacgatgttgatttgattgtgttttgtttggtttcatcgatcttcaattttcataatcagattcagcttttattatctttacaacaacgtccttaatttgatgattctttaatcgtagatttgctctaattagagctttttcatgtcaga

SEQ ID NO: 22108 - DNA, 262 bp, Glycine max
  Clone ID: 701103330H1
cggagacgcaactcatgacgccgccggaaaccctatgaacctttggagcttcgacgacctgccttccatggcaggagtcttctgaacaccctttatctccccttttatgtaaataaagctacaagaattgtgatcgtgatgttggtgatggagtccacagcaagaaacctgcttaaagcttatgtggagtttattttatcttgtagctaatgcagtagtataggactatatataggtttttattatagggtatccttttgtg

SEQ ID NO: 22109 - DNA, 264 bp, Glycine max
  Clone ID: 701103294H1
ctgcttttctcttccctctatcgtttgttctttccttcattcactctcgccgccgcgcgtgctaaaaaccgtctattccagaatgggcagcgagggcgtgccgtcgacggtggcggaggtcatgtcggtggcggccgtcgagctcactgacgcctccagctggtggcacgacatcgacgactctccgctgtggcaggatcgtatgtcctacactctcgccgtactctacggtatcgtggccaccgtagctttggttcaactggc

SEQ ID NO: 22110 - DNA, 266 bp, Glycine max
  Clone ID: 701103305H1
gctaacttagcacagtttacttggttgcccggtttggcccaacccgtttacacttacctccatcaaatagaaaccctagacgcagccgctcttatacaactactctattctaccacatctgagtctctgtccgaagccacttgagagaaaatggcggtgcctctgctctcaaagaagatcgtgaagaagagggtaaagaagttcaagaggcctcagagtgacaggaaaatttccgtcaagactaactggcgcagaccaaagggtat

SEQ ID NO: 22111 - DNA, 51 bp, Glycine max
  unsure at all n locations
  Clone ID: 701103154H1
cacaatatgtcttcttcaantagcaaagnttttngagaaggntcangctnc

SEQ ID NO: 22112 - DNA, 99 bp, Glycine max
  unsure at all n locations
  Clone ID: 701103121H1
cgggcttcgagcacaatgcattggtcctcaagttgacagtanatncngcttaccgaaccnagntcacnttagcccnnacanancgtccagtncaatgag

SEQ ID NO: 22113 - DNA, 47 bp, Glycine max
  unsure at all n locations
  Clone ID: 701103128H1
agtttggccacaaggtggtggatttgctactggnancatcaacntac

SEQ ID NO: 22114 - DNA, 261 bp, Glycine max
  Clone ID: 701103076H1
gcggtgaagtccgccgttgaagaggttctgggatggatccggattctgaaccctaaaatcgtgacggttgtggaacaagaagccaaccacaacggggaagggtttttggagcggttcacggaggctttgcattactattccagcgttttcgactcgctcgacgcgtgtccggtcgaaccggacaaggctgctttggcggagatgtatctgcagagggagatatgcaacgtggtgtgctgcgagggaccggcgcggctggag

SEQ ID NO: 22115 - DNA, 263 bp, Glycine max
  Clone ID: 701103077H1
attattctttctcagactccttcactctgtgttgtcgtttctgtttcttcagcaattcttctcatcgtaggggaaaacatgaagttctgcaaaaagtatcaggaatacatgcaaggccaggagaagaaacttccatgtgtaggattcaagaagctcaagaagattctgaagaagtgcaggagaaactcttcatccctgaaaccccttaatgcatcccttgccgccaaaacctgccccgaccattgcccagtgtgcgatgggac

SEQ ID NO: 22116 - DNA, 271 bp, Glycine max
  Clone ID: 701103033H1
gaagaaacaaggagagtacgagcctccagaaagaccagatcctgatacagattatatcagagctcaggaggcccggcgcttcatgatttatgttcatgccaagatgatgatagttgatgatgaatacataatcgttggatctgccaacataaaccagagatcaatggatggtgccagagattctgagattgccatgggtgcttatcaaccatttcatttggctgccaggcagcctgccaggggacagatccatggtttccgcatgtcgttg

SEQ ID NO: 22117 - DNA, 264 bp, Glycine max
  Clone ID: 701103041H1
ctccctctgcgcaggaattgggaacattcgacaggtagagtttcttcaatggctcctaaagttgataagaagaacgacccaaaggcacaggccttgaagactgctaaggcagttaagtctggtgctacctttaagaagaaggcaaagaagatccgaacctctgtcactttccacagaccgaggacattgaagaaggataggaaccccaagtaccctcgcattagcgcgcctccaagaaataagcttgatcattatcagatcctg

SEQ ID NO: 22118 - DNA, 265 bp, Glycine max
  Clone ID: 701103044H1
gataaaggtgttgcatggcttgtcaaaacacaatatatatctcctctaagcatggagtcaacaaagcagtctttaactgagaaacaagctaaggagctgagagagatgaaaggaggtcgtggcattttggacaatctcaacagtagggaaagacaaatcagggaaattgaagcatcatttgaagcagctaagtctgatcctgttcatgcaaccaacaaagatttgtatcctgttgaggttatgccgttgctgcctgattttgata

SEQ ID NO: 22119 - DNA, 269 bp, Glycine max
  Clone ID: 701103048H1
aagaaagcccatatcatggaaattcaggttaatggtggtagtattgcacaaaaggtggactttgcatacagtttctttgagaaacaggttcctattgatgcagtgttccagaaggatgagatgattgacatcattggtgtgaccaagggtaaaggttatgagggtgttgtcactcgttggggtgttacccgccttccccgtaagactcacagaggtttgaggaaggttgcttgtattggtgcctggcatcctgcaagagtttcattcac

SEQ ID NO: 22120 - DNA, 266 bp, Glycine max
  Clone ID: 701103013H1
atttggtgcatgaggttgtctaacttttttttccaaatgtcctaatggaattcgtatatttaaaactggctattcattaccactttaattttattttattttttgcatcattgctgacatttgaagttaattccagcttctaacatttgtaaaattttccacactttcagttggcaattgcatggaagaagatagtttggagtctcggcatgtgggattctgtccgtgagtttgctagaatgtatgacgctggaatgggtatgatc

SEQ ID NO: 22121 - DNA, 270 bp, Glycine max
  Clone ID: 701103015H1
ggcatctgctattcttaggctttgggagaaaagtttagttgcaaagattggtgtcaagcgtggtattgtgaatacaaacaatgaactgatggctcaggaactgaaggcattaacaggaggtaccttactcctaaggaataaatattacattgtaatatatcgtgggaaggactttgttccaaccagtgtggctgctgttattgctgaaagacaggaattgacaaaacaggtgcaggatgttgaggagaaggtgcggtgcaaagctctcga

SEQ ID NO: 22122 - DNA, 260 bp, Glycine max
  Clone ID: 701102921H1
ctgtgtatttccctacctctcccttcaagatgcagatcttcgtcaagaccctcaccggcaagaccatcacccttgaggtggaaagctctgacaccatcgacaacgtcaaggccaagatccaggacaaggaaggaatccccccggaccagcaacgtctcattttcgccggaaagcaacttgaggacggccgtacccttgctgactacaacattcagaaggagagtactcttcacctcgtcctccgtctccgtggtggcatg

SEQ ID NO: 22123 - DNA, 276 bp, Glycine max
  Clone ID: 701102872H1
gtcagaattgaaggggaaggttgtcctcctctacttctcagctcactggtgtcctccatgccgtgcattccttccaaaacttattgatgcatataataagattaaggaaaagggcaatgcattagaagttgttttcatctcaagtgacagagatcaaacctcctttgatgaattctttgcgggaatgccatggttggcacttccctttggggactcgaggaagaaattcctgagtcgcaaattcagggtatctggcatccccatgcttgtggccat

SEQ ID NO: 22124 - DNA, 272 bp, Glycine max
  Clone ID: 701102775H1
gggacatcccaagctgactgtgctgttcttatcattgattccactactggtggttttgaagctggaatttcaaaggatggacagactcgtgaacatgctctgctttcattcacccttggtgtgaaacagatgatttgttgctgtaacaagatggatgctactacaccaaagtactccaaggccaggtatgatgaaattgtgaaggaagtttcttcctatttgaagaaagtaggatacaaccctgacaagattccttttgttcctatatctgg

SEQ ID NO: 22125 - DNA, 273 bp, Glycine max
  Clone ID: 701102780H1
gagagacataaaaaataaacatatattgagaatggagggttgtgtgaagaagttgctatgccttgttgggtttgtggtgcttgtgagtactattggtggggtggagagtgctggtgaatgtgggaaatctacaacccctgataatgaggcttataagcttgcaccatgtgcctcagcagcacaagatgagaatgctagtgtttctcagagttgctgtgctcaggtgaagaaaattgggcagaaccctagttgcctctgtgcagttcttctctc

SEQ ID NO: 22126 - DNA, 276 bp, Glycine max
  Clone ID: 701102784H1
accaaaaccaatctctttcaataatcaacaacaatgacaaacttgaagcctctaattctcttcttttatctcctagccattgttgttatgatttcaataccatcaagccactgcagcagaaccttgcttccagaaaacgaaaagctgatagagaacacttgcaagaaaactcccaactacaacgtttgccttgagtctctgaaggcaagccctgggagctccagtgctgacgtcacagggctggctcaaatcatggtcaaagagatgaaggccaaa

SEQ ID NO: 22127 - DNA, 280 bp, Glycine max
  Clone ID: 701102750H1
acctgatgtacttgattaccttctctccaatctccacaccgcggtgcataaggagcttaaagggttgttatgggatgatgggtctgcaccggaaaattcaatgataaaggaggacaggttgtgagattttactgtagatgttacggtcactgatgaagatgatgcttgttcttactgtcaaaccagctcctccgtcgtgccaagctttcaagccaccgcgaaagactttgtagtcgctgcgtttgtgaacgacaagcgagcgtttagatctaggtttttt

SEQ ID NO: 22128 - DNA, 201 bp, Glycine max
  Clone ID: 701102685H1
ggaccctcgagagtggaccctacacgttaaaataccgtggtagcatgtggggttacaagcggttacttaagagaacagcactagagacatcagattaccttaaagatgattgccttagtgttaattgtagtgttggtgttgtgaagtcacacacagagggccctaaaatatataaaatcccaattccgtcttctaacatgg

SEQ ID NO: 22129 - DNA, 283 bp, Glycine max
  Clone ID: 701102709H1
cacaattttccttcactcgcagcggaggtttacttttgatctagtacctgctatccctatgtataagcatggacttctagcatactattgtttgattaaccaagttcttccatattggttgaggaagcctcgagtcaatatttagtttttgctgccatctgtgggtttctgatggatgatgccgggcatcgtgaaaatggaaggcacaaagcagcagatcaatataaatctgctcagggacagtggttgatgcaacatcagccttccatgaagcagattatgg

SEQ ID NO: 22130 - DNA, 281 bp, Glycine max
  Clone ID: 701102710H1
gctgatgaagctcctgacacaatcacaggagacattgtttttgtattgcaagtaaaggatcacccaaagttcagaagggagcaggatgacctctatattgatcacaatctcagcttaaccgaggcactctgtggcttccagtttgctgtcaaacatcttgatggtaggcaactattgatcaaatcaaaccctggggaagtcatcaaaccaggtcaatataaagcaataaatgatgagggaatgccacaacacaataggccattcatgaagggtcgccttta

SEQ ID NO: 22131 - DNA, 203 bp, Glycine max
  Clone ID: 701102683H1
gtttgttacttctcttcgccttttgctttgcaattgtcaccaaacaattcttgcttagctctcacaagcaagcattatcaacaatgaagaaaattgtgttaaaggtggacttacatgatgacaggatcaagcgaaaagctatgaagacagcatctggcctttcgggggttcaatcagtttctgttgacattaatgacaagaaa

SEQ ID NO: 22132 - DNA, 214 bp, Glycine max
  Clone ID: 701102615H1
ctcttggactttcctctcactcagatcctggtggcatgaccattcttctccctgatgaaaatgtggcaggacttcaagtacgcagaggagaagattgggtcactgttaagccagtcccaaatgctttcatcatcaacatgggtgaccaaattcaggtgctgagcaatgcaacttacaagagtatagagcacagggtgatcgtgaactcagacaa

SEQ ID NO: 22133 - DNA, 161 bp, Glycine max
  Clone ID: 701102575H1
ttccaaaaattcttaaggatggccacagcagaagaaatttcaactttgaaactgttgcgccaatatctcttgggggatatttcagacccttttctcaccaatctcattccagtaaaacttgaagacccctcatcaggacttgatatgggttcaaacttctc

SEQ ID NO: 22134 - DNA, 160 bp, Glycine max
  Clone ID: 701102576H1
cgcatataacaataagaatttcttacagaccgggttaattgttggtggttgggataaatatgaaggtggacaaatttatggagttcctctgggtggaacaatagtacagcaaccttttgctatcggaggatctgggtccagttacttgtatggtttcttt

SEQ ID NO: 22135 - DNA, 161 bp, Glycine max
  Clone ID: 701102577H1
caagatgatggcaatcttgtgttacttgatctccaaggaaccattttgtggcaaagttttgataccccaactgatactctccttcccggtcaattacttaccagatacacacaactagtgtcttcaagaagccagactaaccattctcctggtttctataa

SEQ ID NO: 22136 - DNA, 161 bp, Glycine max
  Clone ID: 701102578H1
gtggtggcggaggcggtggcgaagagtggaaacaacaactggcattattgttgctgtatgtcagtggaatattacagtgggatttactacgccgagttcgctaaccctctccaatggccacaactcaggaaaaaacgacgccatgttgcgcccctcaaaat

SEQ ID NO: 22137 - DNA, 160 bp, Glycine max
  Clone ID: 701102589H1
ctctctctcaccaaagccttcctagaacgaaaaaaaaaagaagagcaattttccctcaccaaagaagaagaagcaaacaatggccgatcaacttaccgatgaacagatctccgagttcaaggaagccttcagcttgttcgacaaggacggcgatggttgc

SEQ ID NO: 22138 - DNA, 159 bp, Glycine max
  Clone ID: 701102592H1
ggagagtctagagagagaaagcaaagcccaaacaccccttttcaccattgcaatcttcgttcggtttcagagaaccccttttgaatttgtttgaattttctgggaaactgggcattttgtgatcatcatctgggttctctcgatctccatctttttttt

SEQ ID NO: 22139 - DNA, 208 bp, Glycine max
  Clone ID: 701102606H1
gcttcatggagtgggagttttaatgattcatttacccctcaaaaaatgggcaatattaagcctttaggggaagctttgggcatgcccccgtcaagattttcgcctgatgaatctttaatgcataaacctgtgaaaagtagcagttatggagaagatcttcacgaggttgaattttgagcagatgctcaagctgtaaatatcaaatttt

SEQ ID NO: 22140 - DNA, 176 bp, Glycine max
  Clone ID: 701102523H1
caaatcctctgagagaaaaaaaaattagggttttgcatttcgggtcagacagactcagacatgggaggaggcaatgcccagaagtcaaagatggctcgcgagaagaacctcgagaagcagagggctgccgctaagggaagccagttggattcaaacaagaaagccatgtctattca

SEQ ID NO: 22141 - DNA, 171 bp, Glycine max
  Clone ID: 701102525H1
aattcttacaatttattatctttctctaagaactcttccaattttttctctctcttcctctttagcttcatcgccatggcatcaccagcaagaaccttctttgccttcattctcgccgtcgtcgctctcttcttcgccgccgccaatgctcaagacctctccccggctccg

SEQ ID NO: 22142 - DNA, 169 bp, Glycine max
  Clone ID: 701102529H1
cgtcgattcccctaaacatgttcgacatttaatcacagtctctaagcacacattaataccatcggagaaggaccttccatctaccaacaacacgtagtattatttcattgatttctccctcttcgctctctctcagtgaccagagacagatgatgatggagatggcgaa

SEQ ID NO: 22143 - DNA, 170 bp, Glycine max
  Clone ID: 701102530H1
ggcgaatcatgggtccatgtgagataaatctgacaattgcaatttaatactggaaaccacttggccccatcacagatcatgcgatctcattgctaatctggatgttgatatatatgaagcattaaagctgcatagtttggcggtttgctgttctggtatacctaacagcc

SEQ ID NO: 22144 - DNA, 170 bp, Glycine max
  Clone ID: 701102541H1
ctccgatcaccccctcggatccggtatcggcttcaaagaaaccgactctcccaatttcaccggttctttttactccaagaccaaggcaatggtagaggatctgctgaagaactatgataatgtgtgcacattgcgagtgaggatgcctatctcatccgatttattgaacc

SEQ ID NO: 22145 - DNA, 167 bp, Glycine max
  Clone ID: 701102542H1
caatatattccattctctctgtgtatttccctacctctcccttcaagatgcagatcttcgtcaagaccctcaccggcaagaccatcacccttgaggtggaaagctctgacaccatcgacaacgtcaaggccaagatccaggacaaggaaggaatccccccggaccag

SEQ ID NO: 22146 - DNA, 167 bp, Glycine max
  Clone ID: 701102543H1
caaatccgcagcaactattgagggattggcagcgcaggcttcgccaagagtgtcgcaacattgagcgccaaattcgcgatatacagagagaagaaaaaaatgtgcagaaggctattagagaagctgcaaagaggaatgacatgggctctgcaaaggcacttgccaag

SEQ ID NO: 22147 - DNA, 167 bp, Glycine max
  Clone ID: 701102546H1
aatttgcactgagggcattggctagcacacttaatgaagaagagttggctgatataaaagatcaatttgatgctatagatgtagacaaaaatggttcgattagcctggaagagatgagacaggctcttgccaaagatcttccttggaaattgaaagaatcacgtgta

SEQ ID NO: 22148 - DNA, 67 bp, Glycine max
  unsure at all n locations
  Clone ID: 701102548H1
atcgaggggaatcaggttgnggaaaatccaaacagttgatnnaaaantaantccaaagnctcttnta

SEQ ID NO: 22149 - DNA, 171 bp, Glycine max
  Clone ID: 701102550H1
ctcatatttttcgaccttttgttggctacaaagaagtcagacttgttagcaaggaatcgagacaacctgggggtgatccactagtactttgttttgtcgattttttgagtcctgctcatgcagcaactgccatggaagcattgcagggttacaaatttgatgagcttgacc

SEQ ID NO: 22150 - DNA, 170 bp, Glycine max
  Clone ID: 701102551H1
ttctctctcttccctcttcaatcttcacattttctctatggagaatcatggcaacaagcgagtctgggaccagtcctctgactccaacactcagcgggtcgactcgcccgagtctaagattcgtcgagttgactcgtccgattcgggtattaactcgtccgagtctcaac

SEQ ID NO: 22151 - DNA, 169 bp, Glycine max
  Clone ID: 701102555H1
atttttcgcgtcacataaacaaaaaaaaataaactggggagaagcatgttgttgatgttgggactatgcttcctattgttctctgcatttccacttgcgttctctgagagatgccacccacaagacaagaaagcgttgctccaactccagaaggacctcggcaaccctt

SEQ ID NO: 22152 - DNA, 163 bp, Glycine max
  Clone ID: 701102558H1
caagagtggtttttacagttgatcctgaggataaacatacagaaatgtcttcagctgtcatcagtttgataagagcatcatttacaaccctggttatacgcccatcaattcttcaccttacttcttcatccttgtttggagatccctactcttttgaagtgct

SEQ ID NO: 22153 - DNA, 163 bp, Glycine max
  Clone ID: 701102559H1
gtactcataaccgcatcaggtctccaaggtgaacagcctctggtcgatggaacaatgtaggcaagggaagtcggcaaaatggatccgtaacctcgggaaaaggattggctctgagggctgggcacgggggtcccagtcccgaacccgtcggctgtcggtggac

SEQ ID NO: 22154 - DNA, 258 bp, Glycine max
  Clone ID: 701102486H1
gagaaggctgtgcttgaatttggagaacagaatgggttggaagttgcaactgttattgctcctttcattgttggtcgttttgtttgtcccaagcttcctgactccattgagaaagctctgcttatggtgttggcaaaaaggaagaaattggtgtcattcgttaccatatggtacatgtggatgatgtcgctagagcacatatcttcctgcttgagcatcctaatccaaaagggaggtataactgctcaccattcattg

SEQ ID NO: 22155 - DNA, 175 bp, Glycine max
  Clone ID: 701102510H1
ggaagtggcaagtttaagactgtggctgaggctgtagcatccgcacctgacaacggtaagacaaggtatgttatttacgtgaaaaagggaacttataaagaaaatgttgaaatcggcaagaagaagaccaacgtgatgcttgtaggagatggtaaggatgcaactgtaatcaccg

SEQ ID NO: 22156 - DNA, 174 bp, Glycine max
  Clone ID: 701102511H1
cagcaacgatggtgcagaggctcacttatcgcaagcgccatagctatgctaccaaatccaaccagcaccgggttgttaagacccctggtgggaagttggtgtaccagaccactaagaagagagcaagtggacctaagtgccctgtcactggcaagaggatccaagggattccac

SEQ ID NO: 22157 - DNA, 267 bp, Glycine max
  Clone ID: 701102457H1
ggccgccgaatcacaacctcaactaatcgaagagagaagagaggagcaagaacttaagtacctggaatttgtgcaattcgcgaccatccaggccctgatgcgctgcgccatcctctactcctacgccaaggagcgcgcggtcctctgaagcccggcgtcaacaccgtcgaggaggccgtgaagaccgtcgtggctccggtctacgacaggttccacctcgtccccggcgaggtcctcaaatacgccgatcgcaaggtcgccgaattg

SEQ ID NO: 22158 - DNA, 263 bp, Glycine max
  Clone ID: 701102466H1
ctattcttacaagttacatccattgagaaacatgaaggtctcccccttagcattttcaatcctttttttgtccttcaccatagaactcttcattggcattgcttcagcagcacaagaaccagtgcttgacacctcagccagaagctgagaacaggtgtcaagtactacattctaccagtcttcagaggcagaggtggaggcctaacagtttcaagcagtggcaacaacacatgccccctctttgtggtgcaagagaagcttga

SEQ ID NO: 22159 - DNA, 260 bp, Glycine max
  Clone ID: 701102481H1
gttttcattggagttactattggtggaaccttgttcaaagcattcaagagaattagggagcacccgacgttggatgaaatttcatccttgctagctgaaagcctcccaggcaatgctacttttttcttgaccttgtggcccttaaatttttcattggctatggccttgaactgtcccgaatagttccccttattatataccatttgaagagaaaatatctttgcaagactgaggctgagttgaaagaagcttggcgtcct

SEQ ID NO: 22160 - DNA, 271 bp, Glycine max
  Clone ID: 701102441H1
cactcttttctctgctgtttcggcactgttttgagtaggtagatgaggaaaaaggattaaccaaatttgagtgggcatcaaagttggcatagcagaagtggaatcagctcttgtttcaagcaacaggaacatggatgcacaaccaagaaaaaagcattgtttcgtgctaaattgaatgcccaaaagaagaaaaagcgcatagaatctccccttgtaaggtataatgaatttgatctacctgtttgccgggtttgtgatgttgttctaaagt

SEQ ID NO: 22161 - DNA, 263 bp, Glycine max
  Clone ID: 701102453H1
ctgatattctctcttgcaagatatgaagctgtaatagatgcttacttggatggtcttgaggcatctgggttaaatgacctctctagagttacaagtgttgcctctttctttgtcagtagagtggacactctcattgaaaggcccttgagaaaattggcaccccagaggctcttaatctacgtgggaaggcagcagtagcccaagcagcattggcttaccagctctaccaaaggaaattttctggtccaaggtgggaagctcta

SEQ ID NO: 22162 - DNA, 270 bp, Glycine max
  Clone ID: 701102420H1
ccaattccaaattttcagtttcttcctcgcttttctgcaaaatcatctaaatccgtttctgatcctgaatcatcagtttttcccttgaaagatgggaggtggcaaggacaaacacaatgaagaagagaaaggagttttctcaatctggctcatggagtagctcaagctgctcatggttaccctccaggggcataccctccacctcctggggcataccctccttaccaagggtacccacctgctcatggctaccctccacaaggtggctat

SEQ ID NO: 22163 - DNA, 275 bp, Glycine max
  Clone ID: 701102408H1
ttcaactctgcttcccctggcaaccttcttcttagttctctccgcttcttatctccagattgctggggcgaaagcacaaccgttgactagtctcaagcttaactctccgatccttcaggagtctattgctaaagagatcaatgaaaacctgaggcaggatgggaggctgctataaatcctcatttctccaattatacagttgaacaatttaagcgccttcttggagtcaaaccaacgcctaagaaggaactgagaagtacacctgctatatctca

SEQ ID NO: 22164 - DNA, 275 bp, Glycine max
  Clone ID: 701102412H1
gagaagaagaaacttaatcgatcatcacttcacttcactaatacatcatggcagacgagacccagaacaagtatgagagctctgaggttgaggtccaggatcgtggtgtttttgactttctcggtaagaaaaaggatgaagaagacagcctcatcctcaggaggaggtcatcgccaccgagtttcaaaaagtcactgtctcagaccaaggagagaacaagcacagcctcttagaaaagcttcaccgatctgacagcagctctagctcttcaagtg

SEQ ID NO: 22165 - DNA, 255 bp, Glycine max
  Clone ID: 701102389H1
cagaatcattaaagataagattatattgctaagaagaaaaaatatgaaggttgtctacttgcttgttgccctcttggctttgacatcaactgttgtctctgcctatgaccctagtcctctgcaagatttttgtgtggcagccaaagaaaaagatggtgtatttgtgaacgggaaattctgcaaggaccccaagcttgtcaaagcagaagatttcttcagacatgtggaacctgggaaaactgacaacccactagg

SEQ ID NO: 22166 - DNA, 255 bp, Glycine max
  Clone ID: 701102373H1
aagcggtgagattcgtgaatctgagaaatgtcggattcttctcgggaggagaatgtttacatggcgaaattggcggacaggccgagcgttacgaggagatggttgagttcatggagaaggtagcaaagactgtggaggttgaggagttgacggtggaggagagaaatcttctctctgtggcttacaagaacgtgattggtgcgaggagggcttcgtggaggatcatatcctccattgagcagaaggaggagagca

SEQ ID NO: 22167 - DNA, 258 bp, Glycine max
  Clone ID: 701102374H1
tgctcgttgaatccatcctaagtgacttgcttgctgaaggcgacacgaggtagaaactaagaatgggggaagagaatgaagaaacaaaaacatttaaggatttgggcttatccgagtcattggtggaagcttgcgaaaaattgggttggaaaaatccattaaagatacagacagaagcaattcctcttgcattggaaggaaaagatgtgataggacttgcccaaactggttccggtaagactggagcttttgctcttc

SEQ ID NO: 22168 - DNA, 256 bp, Glycine max
  Clone ID: 701102375H1
ctggtttatagatctctgtgaagtcgctttataacactcaacctaagatgcagaacgaggaaggacagatcaccgagctttacattcctaggaagtgctctgccacaaaccgattgattaccgctaaggaccatgcttcggttcaggttaacattgggcatgtggatgagaatggcgtctacaatggccatttctccacttttgctctctgcggcttcatacgtgctcagggtgatgctgacagtgccctagatcg

SEQ ID NO: 22169 - DNA, 101 bp, Glycine max
  Clone ID: 701102386H1
acttgatacaatttataaacaatacaaaagtaatacacagttccagtggttatttgcacacttaggaacatatgtaatgaataataaaaattatggttctt

SEQ ID NO: 22170 - DNA, 256 bp, Glycine max
  Clone ID: 701102388H1
gccagagtgatgtaaaggctgggggtgatgtgtgtggtcgagttggcattcttggcattgcttgggcctttggtggcatgatcttcattctggtgtactgcactgctggaatctcagggggtcacataaacccagcagtgacatttgggctcttcttggctcgcaaggtgtctttgattagagcaataatgtacatggtggctcagtgcttgggagccatatgtggagttgggttggttaaggccttccaaaaggc

SEQ ID NO: 22171 - DNA, 266 bp, Glycine max
  Clone ID: 701102337H1
gggcaaggattttagcttccttggcccaatattgttcacctccctcattactctcatcctcactggcatgatgcagatgttcttccctcttggacctactgcccatgctatctatggtgcaattggtgctatgatattctctggctacattgtgtatgacactgacaacctgatcaagcgtttcacttatgatgagtacattggagcctctgttactctttatcttgacatactcaacctcttcctttccatcttaaggatcctca

SEQ ID NO: 22172 - DNA, 261 bp, Glycine max
  Clone ID: 701102346H1
gtcgctccgcaccagtttcaccgcacgaatatcttgttgtttggagcgatccgagaaaaactctgtaaacatgttggtttaccaggacctccttacaggtgatgagcttctctctgactccttccgttacaaggaaattgagaatggaatgctgtgggaagttgaggggaagtgggttgttaaaggagcagttgatgtagacattggtgcaaacccttctgctgagggtggaggagaagatgagggagttgatgatgcagc

SEQ ID NO: 22173 - DNA, 264 bp, Glycine max
  Clone ID: 701102348H1
taaaatcaaccatgggttcagcagctgagactcagattactccaacccatgtatctgatgaagaggcaaacctttttgccatgcaactagccagtgcctctgtactccctatggttctcaaatcagctcttgagcttgatctgttggaaatcatagccaaggctggccctggtgttcatctttcccccactgacatttcttctcagcttccaacacagaaccctgatgcacccgttatgttggaccgcattttgcggctcttgg

SEQ ID NO: 22174 - DNA, 270 bp, Glycine max
  Clone ID: 701102349H1
ctctgccgaagataaaaccactggccagaaaaataagatcactatcaccaatgacaagggtagattgtcaaaggaagatattgagaagatggttcaagaggctgagaagtacaagtctgaggatgaagagcacaagaagaaggttgaggccaaaaacgctttggaaaactatgcatacaacatgaggaacaccgtgaaggatgacaagattggtgagaaacttgacccggctgacaagaagaagattgaggatgcaattgagcaagcaat

SEQ ID NO: 22175 - DNA, 267 bp, Glycine max
  Clone ID: 701102351H1
gtcgctccgcaccagtttcaccgcacgaatatcttgttgtttggagcgatccgagaaaaactctgtaaacatgttggtttaccaggacctccttacaggtgatgagcttctctctgactccttccgttacaaggaaattgagaatggaatgctgtgggaagttgaggggaagtgggttgttaaaggagcagttgatgtagacattggtgcaaacccttctgctgagggtggaggagaagatgagggagttgatgatgcagctgttaa

SEQ ID NO: 22176 - DNA, 258 bp, Glycine max
  Clone ID: 701102212H1
tcaaagttggtatgtcatgtgaaggatgtgttggagcagtgaagagagttctaggaaaattggatggtgtggaatcatatgacattgatttgaaggaacaaaaggtggtagtgaaaggaaatgtccagcagacacagttctgcagaccgtttccaaaactgggaagaagactaccttctgggaaggtgaagcagcaacatctgaaactagcacagcaactgcctaaaacatttgcctctattctgtgcagaagaagta

SEQ ID NO: 22177 - DNA, 260 bp, Glycine max
  Clone ID: 701102226H1
atactactaactgtgttgtaatacctcagtggagaacaagatgaatccatggaacatgagaacttccaagttactctctcaacaacttgcttatcctccttatcgcttggtagaagagattccaaacatggaaattccagttgtgtgagcaaggagccaagaggttcacagatgacaatcttttatggtggccaagttcttgtcttggatgatattcaagctgacaaagccaaggacatcatgtcttttgccggcaaagg

SEQ ID NO: 22178 - DNA, 265 bp, Glycine max
  Clone ID: 701102176H1
cgagaattactccttaggcaaatcgcttacgaataaccaaatcttaaaacttgcatccaagggtccacagagaaacgctatcaacattgttctcacttctgctgacgtggcagtggaggggttctgttccagtaggtgcggaacacacggatcctccgtgggggcgcgcgtgaacggaaagagatacaagttggcgtacatttgggtgggtaattcagagacacagtgcccgggtcaatgcgcgtggccgttccaccaacccatt

SEQ ID NO: 22179 - DNA, 268 bp, Glycine max
  Clone ID: 701102126H1
ctaaaacaaactttgtgtagttaaaaattagaatgatgaaaaacaatagcccacaagattggcctgagccaatagtcagagttcagtccttgtccgaaaggtgcacagattcaatccctgagaggtatatcaaacccctcagtgaccgtccatctgatgatgccgttgctgttgatgatgccaacatcccaatcattgaccttgcagggctttatggtggtgacccagatgctcgagcctccacactgaagaaaatatctgaggcttg

SEQ ID NO: 22180 - DNA, 273 bp, Glycine max
  Clone ID: 701102135H1
caaagttagttagaaattgaaagggaaagggaaacgaaaatgagtagtagggtttggtgtgtggtgatggtatcagcgttggcgttgatgttacaatggcacgaagcattcagctcctacgctggctccgcaagtgcgatcatcgacccttccaaggtcaaacaagtttcgtggaaaccgagagctttcgtttacgagggttttctgacggaattggaatgcgatcacttgatttccatcgccaaatcggagctcaagagatccgcggtggcc

SEQ ID NO: 22181 - DNA, 271 bp, Glycine max
  Clone ID: 701102137H1
gctaccaaagctttagagtgtacaaatatgagtaagatcctggacagggtggtatctgtggagtatgctctgagggatgatggtgagaggggtgacaattatgacagtcctagaagaagagggggttatgagagatcacccagtccttatcacaggcgaccaagtcctgactatggtcgtccacgcagccctgtctatgataggtacaatggtggtggaccagacatgcggaggagtcctgattatggcaggcacaggagtcctgactatg

SEQ ID NO: 22182 - DNA, 268 bp, Glycine max
  Clone ID: 701102141H1
ggaagtatgaaatatcttgaggatgatttccccaacattttctctcattcctctctgtcctctgaagaagagttgaatcctttcaagaatcatcagaacatgttggctggtttagactatgttgttgcccttaagagtgatgtatttctctacacttatgatggaaatatggcaaaggccgtacaaggtcataggcgctttgaagacttcaagaaaaccatcaatccagacaagatgaattttgttaaacttgttgatcagttggatg

SEQ ID NO: 22183 - DNA, 270 bp, Glycine max
  Clone ID: 701102114H1
agatttgactcttgaaactcaacaaaaaagaagagctagaaaccatggtaaaggatagaaaggttggtgttgcattggacttctccaatagcagcaagattgctctcaaatgggccatcgaaaacttggctgataaatgccacaccttttacatcatccacgtcaatcccaattcttctgatgatcgtaaccagttgtgggcaaaatctggttctcctcttattcctttgacagagttcagagaggaagagattatgaagcactatggcg

SEQ ID NO: 22184 - DNA, 244 bp, Glycine max
  Clone ID: 701102035H1
gtgattttcacacggaaacaaagagggaacatgatctgctggatgtgggaggtcaggttaatgaagaggctgagggcattgagaatgctaaatggatttccatcaaagcagttctgcttctgctattgggtactattattgctgctgcgtttgctgatcctctggttgatgcagtggataacttttctgaggctacaagtattcctgctttcttcatttccttcatttttctgcccttagcaac

SEQ ID NO: 22185 - DNA, 243 bp, Glycine max
  Clone ID: 701102051H1
cgacaactctatctttctttctcattcggccaaaatggccaagaaggtttaccctcaggatcccacttcctctccctgcatgtcccatggaccagaaacatataccctttggatgaaatcacttattctccactctaacggttgcaccgtctatgattcaaatggtgtcatcgtttatcgcgttgataactatgacacaaagggtagaagacacgttaaccttttggatctgcgaggcagagt

SEQ ID NO: 22186 - DNA, 246 bp, Glycine max
  Clone ID: 701102007H1
ggatttcaatcgttgttctctccgaaaacttcgcttcttcctcgtggtgccttgaagaacttgtgaagatccttgagtgcagggaaacaaagaagcaactcgttattccaatcttttaccgcatggatccctccgacgtaaggagacagactggttgttatggggagagcctggctcaacatcaatatgagttcagaagcgactccgagaaagtacgcaattggcaggaagctttgactcatgtcg

SEQ ID NO: 22187 - DNA, 273 bp, Glycine max
  Clone ID: 701101934H1
acagcacggtggtgacgaccatggttagagacgatctatgcatcaccgttcccagcttcttccgctgccctatctccctcgacgtcatgaaatcccctgtcagcctctgcaccggcgttacctacgaccgttccagcatccaacgctggctcgacaacggcaacaacacctgtcccgccaccatgcaggttctccaaaccactgatttcgttcccaaccgaaccttacagaggctcatccagatctggtctgactcggtcactcaccgagtcg

SEQ ID NO: 22188 - DNA, 50 bp, Glycine max
  unsure at all n locations
  Clone ID: 701101713H1
cggntngaggaacgttgctataaacgtggtggttttnagtnaacnncgtg

SEQ ID NO: 22189 - DNA, 277 bp, Glycine max
  Clone ID: 701101626H1
ggcagctcaaacccttgagtcaattttggtgtctgacgttcaagattttgtcattgggaaagatggggtgaagattccagtgtcagaattgaaggggaaggttgtcctcctctacttctcagctcactggtgtcctccatgccgtgcattccttccaaaacttattgatgcatataataagattaaggaaaagggcaatgcattagaagttgttttcatctcaagtgacagagatcaaacctcctttgatgaattctttgcgggaatgccatggttg

SEQ ID NO: 22190 - DNA, 265 bp, Glycine max
  Clone ID: 701101591H1
ccaaaatataccactcttcaattcacaaaaaaacacacaaacctcttcagttcacaaaccacacaacctcttctaatattcgttttctgatctacgcaaggttaaggttaatttgcttctatctacatggacattaacgagatcgatgttccttcattctttctctgccccatttcgttagaaatcatgaaggatccagtgacggtctcaacaggcatcacctacgaccgtgaaagcatcgaaacatggctgttctcgaagaaaa

SEQ ID NO: 22191 - DNA, 271 bp, Glycine max
  Clone ID: 701101603H1
cttcctacgctccagtcccacctccccagcccaaacctcttgtcgattggtccaccggcctctgtgactgcttctccgaatgtggaaactgttgcatgacgtgttggtgtccatgtgttacctttggccgagttgcagaaattgttgacaagggatccacatcatgtggtgctagtggggctctgtatacgctgatttgctgtgtcattggctgtggctgcctatactcttgcttctaccgccccaagatgagacgacagtatggtctaaa

SEQ ID NO: 22192 - DNA, 270 bp, Glycine max
  Clone ID: 701101527H1
ctagtctcatagtgtcatactgcaacacaaaacaatgggttcccttatggcaggatgggaccctacccacatagatcctcaatcagccacacttaaaaggaaccgctcactcaccaaggatgaaattgatgcttactggaaatcaaagaagaagatagaggaagaacaccttagagctatttccaacttgtcagagactattcaggctagcaaaagcacagaacctgagaagaagttgcagaagtcaatgaccatgcctgtgacccgtgc

SEQ ID NO: 22193 - DNA, 261 bp, Glycine max
  Clone ID: 701101379H1
gaagaatccaaaagcaatcccatctgtgtgtttgcacatcagaagggagggctatcaaactcaaaggattgctctgaatcggtttagtcttcttcgtttttcttcaaattcctcgtgacagatctaatctaatcaggcttttgggggtgtttcagacattgcatgcatatgggagcagtggttgtgttggatgctataaaaggcctacactgagtgctactgtggatgtgccatcgaaagggttggcaacacaaggtaacg

SEQ ID NO: 22194 - DNA, 230 bp, Glycine max
  Clone ID: 701101407H1
ggaaaaaatggtgtcgctgaaactgcagaagcggctggccgcaagcgtgctcaagtgtggcagaggaaaggtgtggcttgaccccaatgaagtcaacgaaatctccatggccaattctcggcaaaacatcaggaagttggttaaggatgggtttatcatcaggaagccaaccaagattcactcacgctcgcgtgctcgtaggatgaaggaggcaaagaagaagggccggc

SEQ ID NO: 22195 - DNA, 231 bp, Glycine max
  Clone ID: 701101408H1
gttccttttgaaggttagaagtgctacaatacaaacaatggcagctactcaggaagatgtgaagcttttgggtattgtgggaagcccatttgtgtgcagggtccagattgcccttaagttgaagggagttgaatacaaatttttggaagaaaatttgggcaacaagagtgatttgcttctcaaatacaaccctgttcacaagaaggttccagtgtttgttcacaatgagca

SEQ ID NO: 22196 - DNA, 201 bp, Glycine max
  Clone ID: 701101254H1
ggaagaggttttggtgattgaagggattgagtttgagagaaacacacctgtgaaatttgatgtgtttatcaatgatgaagatgataagcagattcgaccagataatacagaatttgcaggaagctttgtgagtgtgcctcattcacatatgcacaaaaacaaggacatcattacttgtttgaggctgggacttacggattt

SEQ ID NO: 22197 - DNA, 194 bp, Glycine max
  Clone ID: 701101259H1
gtgatttggaaatggtttatgtggggcagttgtgcctttcttgggaatttcttcagtgggaatatgagaaggccttgaagctatgggaatctgaccaatacgggttgctaaggttcaatgaagtagcaggggaatttcaacaattccatgtccttctccaaaggtttatagagaatgaaccattcctccaaggt

SEQ ID NO: 22198 - DNA, 150 bp, Glycine max
  Clone ID: 701101193H1
caagctccccggacggcaccggtgcttcttcatcggtggcatctaagaacattgtctccgagaggaatagaaggaagaagctcaacgataggcttttggcacttagagcagtggtccccaacattaccaagatggataaggcttctatca

SEQ ID NO: 22199 - DNA, 154 bp, Glycine max
  Clone ID: 701101196H1
atctggttggaaaattgtttcttgttttgaggggagatttcctgatagaatgaagcaattacctttagataggcattttgatatcaacaatgtgaagaggattgtgttagaagcagatggttatcagccgtatcttatttcccctgaaaaggga

SEQ ID NO: 22200 - DNA, 203 bp, Glycine max
  Clone ID: 701101210H1
gttaactataatgctggagcacagacaacagtttcaaatataatcatggctgcagctgttctagtgacacttctgtttctcatgcctcttttctactatacaccaaatgttgtcttagcggccattatcatcactgctgtgattggtctaatagattatcaatctgcatataaattgtggaaggttgacaaacttgatttctt

SEQ ID NO: 22201 - DNA, 202 bp, Glycine max
  Clone ID: 701101213H1
ctgatacagattatatcagagctcaggaggcccggcgcttcatgatttatgttcatgccaagatgatgatagttgatgatgaatacataatcgttggatctgccaacataaaccagagatcaatggatggtgccagagattctgagattgccatgggtgcttatcaaccatttcatttggctgccaggcagcctgccagggg

SEQ ID NO: 22202 - DNA, 201 bp, Glycine max
  Clone ID: 701101225H1
cataaacacatcaaactattagcaatttagcaccttctactactttgtaatcgttcaagagttgtgaactgtgaagaatgagttcaacaagccgtgcttggacttggagcgtggcagcaagtgttggagtggtggaggccttgaaggaccagggtatatgcaggtggaacagtgtgatgagatcagcacaacaacatgcta

SEQ ID NO: 22203 - DNA, 198 bp, Glycine max
  Clone ID: 701101245H1
gtcagaactcgtctgaaaaacctgataagcgtttcctttcggggtctactccagatatctttacctgtggaagtgatatttgtcattgcaggcagatatatgtcaagggccaaatttgtgagagtgatcatatttgttatgatgaacatggagatgcatgtgactgctccaatttccttgatgtggactggctttctt

SEQ ID NO: 22204 - DNA, 152 bp, Glycine max
  Clone ID: 701101165H1
gacaacttctgagcatgcttgttaagctcacgaattcaaagaacgccttggaaattggtgtattcactggttactctctgctctccactgccctggctcttccccctgatggaaagatcttggctttggatgtgaatcgcgaatactatgag

SEQ ID NO: 22205 - DNA, 153 bp, Glycine max
  Clone ID: 701101181H1
attacctatatgtcagataatcctagaaactcagcaaactaggcgtcgcttgagctttttaagaagatcaaagtatgttcttgtggctgcttcatccacatacagtagaaagttgtttttcctcaactgtaccaatggtcaactatatgtcgg

SEQ ID NO: 22206 - DNA, 151 bp, Glycine max
  Clone ID: 701101183H1
ttctttttctctaagtctaaggggtgccctgagatcactttgagcaatggtgaaggctgtggcagttcttggcagcagcgagggtgtcactggaactattttcttcactcaggagggaaatggtccaaccaccgtaactggatctcttgct

SEQ ID NO: 22207 - DNA, 151 bp, Glycine max
  Clone ID: 701101184H1
attaaatccactttgaacctgtaccatgtctctcgttaaacaaggcatttcaattatcgtgtcttcttggctctctgtttagggttgagtatgaagttgaatattgcagcactggccaaaagaatggtaatggctgtcttgatgggaagag

SEQ ID NO: 22208 - DNA, 149 bp, Glycine max
  Clone ID: 701101190H1
gttgtacgttccgacaataataacaaggtaaatagtgcataccctgatgaattccatggaagtaaaggtaaaattgtcaattgggtgcctcagaggaagatattgaaccaccctgccatagcttgcttcattagtcactgtggttggaa

SEQ ID NO: 22209 - DNA, 86 bp, Glycine max
  Clone ID: 701100994H1
gaagggttcactgttagttgagtaacgatgcttgccctttgccaataaatattcgtgtaggtatccaagtttctttagcagtattg

SEQ ID NO: 22210 - DNA, 288 bp, Glycine max
  Clone ID: 701100958H1
cacaaaagctttcattgctcctagcaattcacaacaacccttcttttttagctttcacgaaactttccaacaatgaattcctcaaaggcatgcacccttttgaatttggtagcggttgttatgttcgttgccattttgattagccaaagtagggtggaggctagggttttatctcattcggaggaatttgcatttgcaagagctaataatctccaaacatacacctcatcagcctatgagcaagccaagaaaaccatgggtttttggatgcagcgtttggcttctgga

SEQ ID NO: 22211 - DNA, 290 bp, Glycine max
  Clone ID: 701100914H1
cttctctgcagaaaatcgaatcaatcgatggatgctttaatttcgtgtggttattgaggaaatttcatatccgcaagggcagagagtagaaggaagaagagagaaagagggaaggtaataacaaatccctcgctagagcctagaactagaattagattctgcctgtgatcatatattatattacgaaattcaattgcagctgctgctgaatcgtaatcgatcttatatctacactctaccatggacattgatgatgatttcacattttgtcaggtcagtgcacctgttga

SEQ ID NO: 22212 - DNA, 271 bp, Glycine max
  Clone ID: 701100861H1
ctttatttcagggtgttgatttttgctcctcaatcactcgtgcaaagtttgaggaaatcaatatggagctctttgaagagtgtatggaaacagttgataggtgtctttctgatgctaacatggacaagagcagtgtacatgatgttgtccttgttggtggttcttctaggattcccaaagtgcaggagctattgcagggcttcttcgatgggaaggttctgtgcaagagcatcaaccctgacgaggctgttgcttatggtgcagctgtgca

SEQ ID NO: 22213 - DNA, 272 bp, Glycine max
  Clone ID: 701100863H1
gtttgttgttgtaactcgttcttcttcttttgttgttctgtgtttgtgtttgttttttctctcacctgaaaatgtcttgctgcggtggtaactgtggttgcggaagctcctgcaagtgcggcaacggctgcggaggctgcaagatgtacccagacttgagctacactgagtcaaccaccaccgagaccttggtcatgggagtggcacctgttaaggctcaatttgagggtgctgaaatgggtgtgcccgctgagaacgatggctgcaaatgt

SEQ ID NO: 22214 - DNA, 272 bp, Glycine max
  Clone ID: 701100881H1
ccagagagtacgtgagggaaacatttgcgtggatgcactattactggttcctcaccaacgatggaattgagttccttaggacttacctcaaccttccatccgaaattgtccctgccactctcaagaagcaggccaagcccgccggaagaccattcggtggcccacccggtgatcgccccaggggcccacctcgctttgacggagagaggagattcggcggtgaccgtgatggataccgtggaggtccacgcggacctggcggtgatttcggt

SEQ ID NO: 22215 - DNA, 272 bp, Glycine max
  Clone ID: 701100882H1
gtgatgctggttttgttaagatgattccaaccaaacccatggttgttgaaactttctccgagtatcctccacttggtaggtttgctgttagggacatgcgtcaaactgttgctgtgggagtcatcaagaacgttgagaagaaggatcctaccggagccaaggtcaccaaggctgcccagaagaagaagtgaatcgtgcgggctggttcatcaggggatgttggttacaataaatgttggtttcttttctgtactcttgtgtcttcttttcta

SEQ ID NO: 22216 - DNA, 277 bp, Glycine max
  Clone ID: 701100832H1
gctatttgtggcgctggcgtggtgaagggtttcgaggggaaaacaaaatacggtacgttgaatggtggtgccaactttgttgcccctggttacaccaagggtgatggtcttggtgctgagattgttggcactttcgtccttgtttacaccgttttctccgccaccgatgccaaacgtaacgccagagactctcacgtccccattttggcacctttgcctattgggttcgcggtgttcttggttcacttggcaaccatccctatcaccggcactggta

SEQ ID NO: 22217 - DNA, 277 bp, Glycine max
  Clone ID: 701100833H1
ctggtgcaactatcacatgggacattgtagtgggagggtgggacttggaatacagtgctgagtttgtgccaaatgctgaaggaagctacaccatagctgttgagaagccaaggaaaatgggggcatcagaagaagcaatccacaactcattcacatcaaaagaatctggcaaaatggtactctcggctgacaacactgcctcaaggaggaaaaaggttgctgcatatcgctacgttgtccgcaaaagcagcaccatttgagaatggctattattaaa

SEQ ID NO: 22218 - DNA, 277 bp, Glycine max
  Clone ID: 701100802H1
aaaataggtcaaggtggttttgggtcagtctattatgcagaactgaggggagagaaagccgcaatcaagaagatggatatgcaagcatcaaaagaatttcttgctgaattgaacgtcttgacacgtgttcaccatcttaatctggtgcggttgattggatatagtattgagggctctcttttccttgtctatgaatacattgagaatggaaacttaagtcaacatctgcgtggttcaggtagtagagaacctctgccatgggctactcgggtgcaga

SEQ ID NO: 22219 - DNA, 278 bp, Glycine max
  Clone ID: 701100806H1
gattttaactatggcccatatatgctcagggaagaagttgaaaaatacaagaggtatgccgagaggttggagccctttattgctgatactgtgcttgtcatgaatgacgccatagaacaaaagaagaagattttggttgaaggaggacaagctaccatgttggacattgattttggaacttatccctttgttacttcttctagcccatcagctggtgggatatgcactggtcttggtattgctccaagggtacttggtgatttaataggagtggtgaa

SEQ ID NO: 22220 - DNA, 278 bp, Glycine max
  Clone ID: 701100807H1
gataggtaccagctatcacatagtttatttaatccgttatatgccacctgatatataggcatattagctagttaggtaggtatagtagtttaagttaattcaaccatggaagacagggatcactgttgttccaacaattcaacgatgatcacaacaacaaagaaaagaacgggtagaagaagtccaacatcggataagctcaagaatcaacaccgcgagaagcagtcgatgaaaccttaccgtggaataaggatgcggaagtgggggaagtgggtggc

SEQ ID NO: 22221 - DNA, 277 bp, Glycine max
  Clone ID: 701100818H1
agaagggtaaactaggagtaggagggaagaagggttgaaggaagaaaaaaagaaaaacacagaaatggagggtgggaacaacagcagcagtaacaacaaccctgatgagttggcggtggggtgcttgctttcgatcaggacaacgttgggcgacgaattcgaaggccaggtcgtcaccttcgatcgcccctccaacattctcgtactccaggagccttccaaacctagccctcgtcgaaatcttaggttgctcaaagccaattacatcaaagacttc

SEQ ID NO: 22222 - DNA, 168 bp, Glycine max
  Clone ID: 701100821H1
ttttcaactggtttggtgagatgaagggtgttctttccatcagcttcttgttttgttgcttgctgctacttttggattcttcagtttcacttcctctatgcgttgattcaagggcaccctttaccttgaacaagacacttgggttttgtccttacaatggaagcacgt

SEQ ID NO: 22223 - DNA, 283 bp, Glycine max
  Clone ID: 701100769H1
atctccatcatcatatcatagccttttctttcatagctactacactactttatcactttcattctttaattgggttcaaagaagcttaattaattggttgcagagattgaaaattaggaaaatggtgagtgttgaagagattcgtaaggcacaacgtgcggaaggccctgccaccgtgatggctattggcacggccactcctcccaactgcgtagaccagagtacctatcctgactattatttcagaatcaccaacagtgatcacatgaccgagctcaaagaa

SEQ ID NO: 22224 - DNA, 285 bp, Glycine max
  Clone ID: 701100738H1
caatatcaccttgggtgctgagaatgaattaaaacatgcagttgcatttgttcggccggttagtgtggcctttcaggtggtgaatgggttccatttctacgagaatggagtttacactagtgacatttgcggtagcacttcccaggatgtgaaccatgccgtccttgctgtggggtatggagttgaaaatggcgtcccatattggctcataaaaaattcatggggagaaagttggggtgagaatggctacttcaaaatggaattggggaagaacatgtgtggtgt

SEQ ID NO: 22225 - DNA, 286 bp, Glycine max
  Clone ID: 701100754H1
atgatattaatcttggtgactacaaaggaaaggtccttatcattgtcaatgttgcctcacaatgtggcttgactaattcaaattacactgagctcagtcagttgtatgagaaatacaaacagaaaggtctggaaattctggcatttccatgcaatcagtttggggcacaggagcctggatctaatgaacagatacaagagtttgtttgtactcgcttcaaggctgagtttcccgtttttgacaaggttgatgtgaatggtgacaaagctgctccactgtacaagta

SEQ ID NO: 22226 - DNA, 281 bp, Glycine max
  Clone ID: 701100680H1
gaggagggttgccacttgcatgcaccatgtacgcttcatcagagtgttactttggactcaaccttaatccgatgtgcaagccctctgaggtttcatacaccattatgccaaacatggcatatttcgaattccttccccacgatcctaagccggctccaccagttcaaaactagtggagttggcggacgttgaagtggggaaggaatacgaactggtgatcacaacctatgcgggactctatcggtaccgtgtgggcgacatcctccgagtcaccggtttcc

SEQ ID NO: 22227 - DNA, 272 bp, Glycine max
  Clone ID: 701100683H1
gtgagttggcggagtttctggataggaaggtccccgcgaacgcaattcctgttgaaggggtgttttcaatcgattatgttgatagaaacgcgggtttgttttaccgtgtgtacttgccagcctctggaaacgaggctcaatggggtatcaaagaccttgagaagccgttgagtactacagaaattgttcctgtgatcatattcttccacgggggaagcttttcgcattcctcggccaacagtgccatctacgacaccttctgccggcgcctt

SEQ ID NO: 22228 - DNA, 277 bp, Glycine max
  Clone ID: 701100693H1
ctcctataacaatctctaaatcaagtttgaagccgagaaaataatcatggccggtggtgcaaatttcgtgcaaagggttctctcttacgtggtgaatgaagtggttatcaatggtcttgccaacagccctgcatttcagaggtttgcagtgaggacatcaaaaagaattgaagatatttctaacaaagctgttcagaagaggcaggagctagctgagcagatcaaggacatctcgaaaaatatggagtcattcaagaacaagtaattttggtatttt

SEQ ID NO: 22229 - DNA, 285 bp, Glycine max
  Clone ID: 701100605H1
caacaacaaaaaaagacaaaaactacttccttctctcctttgctgtgttttctttctcaaaaatgggtcgtacctatgttcttatgatggttgctgcattgttgttgagctccaccatggctcaatctccagcttcgtcgccggctttgtcccccaccacacgccggtggccactccacctaggagggcgttgtcgccgtctccgtcgtctgtgtcaccagcggcttcacccgccaccggaaattctcctccggcaccacctacttcttctccttcggaatcgcc

SEQ ID NO: 22230 - DNA, 267 bp, Glycine max
  Clone ID: 701100540H1
cctcctccctcaatccggcgtcgtttcttggctccaacgctaaacgaggcgtcgttaccatggttattccttttcaacgaggaagtgcatgggagcaacctccaccggacttagcttcttacttatacaaaaatcgaattgtttatttgggcatgtctcttgttccatctgttactgagttgatactagctgaatttctttaccttcaatatgaagatgatgataagcctatttacctatacataaactccactgggacaactaagg

SEQ ID NO: 22231 - DNA, 268 bp, Glycine max
  Clone ID: 701100480H1
ctttgttgctgatgctgctatcataactgttcctattggaatcctaaaagccaatttaattcaatttgaaccaaaacttcctgattggaaggtttcagcaatttcagaccttggtgtgggcaatgaaaataagattgccctaagatttgacaaagtattttggcctaatgtagaactcttgggcactgttgctccgacctcttatacctgtggctattttctcaatcttcacaaagcaacaggccatcctgttcttgtctacatggta

SEQ ID NO: 22232 - DNA, 264 bp, Glycine max
  Clone ID: 701100484H1
aaactcccaagtgataaacagaagaggtttcactttttcaattgctttttctttcctaagcttgttgatttaagcacagataatcgttcaattgcttgtgatggtaaagcagcatttcagcgtgtaagcaattggacaagaaaagtgaacctttttgaaaaggattatatcttcattcccataaactatagtcttcattggagtttgattgtcatttgtcaccctgctgaagtcatgacatgctacagagatgaagaaactaag

SEQ ID NO: 22233 - DNA, 261 bp, Glycine max
  Clone ID: 701100487H1
ctgctatttgccattgtcactctcattctcgatggcggcgaagatttcattggcaattggtttgagaactctcttcactgttttgggacttcttatgcttgctatcgttctttacactgtcttcaccgatggtcttccgtttcgcaaagaacttctcacaccgtggatggcagcaactttgattgatttttatatcaacgttgtagctttggcggtctggattgcttacaaggaatcaaacttaatcagctcaattctgtg

SEQ ID NO: 22234 - DNA, 185 bp, Glycine max
  Clone ID: 701100445H1
ctcagaatttctaaaggaaaattatgtgcactacttgtttgacattgagttgttgctgttaggatttcgtttcaaaaggatatgcttgtaagttgtaatccaggatttctccatgtcaaagaaatccaaggttgttcctgacatttcgctgtttcgataaataaattatgtggcatctttctatt

SEQ ID NO: 22235 - DNA, 272 bp, Glycine max
  Clone ID: 701100421H1
agctagcatatatagtttattaatcagttacatatatatacatatataccacctgatatataggcatatagccagttaggtaggtaggtaggtacatagtagttaagttaattcaatcatggaagaaagagatcaccgttgttccaacaattcaacgatgatcacaacaacaaagaaaaaaacgagcagaagaagtcccacatcggataagctgaagaatcaacacccctgtgagaagcaggcgatgaaaccgtacagaggaataaggatgc

SEQ ID NO: 22236 - DNA, 265 bp, Glycine max
  Clone ID: 701100355H1
cctatactctatttttcgcgtcacataaacaaaaaaaataaactggggagaagcatgttgttgatgttgggactatgcttcctattgttctctgcatttccacttgcgttctctgagagatgccacccacaagacaagaaagcgttgctccaactccagaaggacctcggcaacccttatcacatcatatcctggaacgcaaaggaggattgctgcgagtggttctgctgcgttaagtgtgacgagaaaacaaaccgcgtcatta

SEQ ID NO: 22237 - DNA, 266 bp, Glycine max
  Clone ID: 701100362H1
cttttgagtcttccaagttttcaccatcgtaatgggttccgaaggatccagcgtcgtggttcctaggaatttcagattattggaagagcttgagagaggtgagaagggaattggggatggaactgttagctatggaatggatgatgctgatgacatatacatgcaatcttggactgggactatcatcggtccccctagtactgttcatgaagggcgtatctaccagttgaaattgttttgcagcagggattatccagacaatcctc

SEQ ID NO: 22238 - DNA, 273 bp, Glycine max
  Clone ID: 701100307H1
ttgaaccaatgacaatgcttcagaaaatggctgagcttatggagtactcttacctgttagatatggcggacaagactgaggatccatacatgagactagtatatgcttcatcattctttatatctgtctactatgcctatcaacgaacgtggaagccattcaatccaattcttggtgagacttatgaaatggttaaccatggtggcattacatttatatcagagcaggtcagtcatcaccctccaatgagtgctgggcatgctgaaactgaac

SEQ ID NO: 22239 - DNA, 268 bp, Glycine max
  Clone ID: 701100138H1
tgaagaccttgcagagcagattggaaaggatatatattttgatcttgtagaccatgacaaagtgaggagtttccgtgttcaaaaacagacgtcttttaacctttttaaggaagaggttgctaaagagtttggcataccagttcaattccagcgcttttggctatgggcaaagcggcaaaaccatacgtatcgtccaaatcgaccattgacacacatggaagaagcacaatctgttggacaattgagagaggtatcaaacaaggttcac

SEQ ID NO: 22240 - DNA, 54 bp, Glycine max
  unsure at all n locations
  Clone ID: 701100158H1
cttaanaattcaatctttcggnttcgacntcttgcaagtgacaaangaaanngg

SEQ ID NO: 22241 - DNA, 268 bp, Glycine max
  Clone ID: 701100123H1
gctcaccattattggctacaaaaggcagactgatacaacggtaggtggcaccgactgtgatggggttggcattttgggcatcgcttgggcctttggtggcatgatcttcatccttgtttactgcaccgccggtatttcaggaggacacataaacccggcggtgacattcgggttgttcctaggacgcaaggtgtcgttgataagggcgttgttgtacatggtggcacagtgtgccggtgctatctgtggtactggattggccaagggg

SEQ ID NO: 22242 - DNA, 272 bp, Glycine max
  Clone ID: 701100125H1
atgatctcctccatgctgatcatttgttttcaaagcttaagaaaaggtgcaatttggctgctgtagtggctgaggctgatcggattcttaggcctgaaggaaaacttattgttcgcgatactgttgagatcattgaagagcttgagagcatggctaggtctatgcagtggaaggttcgcatgacttactccaaggataaggagggtttgttatgtgtggagaagtccaagtggcgacctaaggagcaggaaaagctcgagtatgctattgct

SEQ ID NO: 22243 - DNA, 259 bp, Glycine max
  Clone ID: 701100079H2
caaaaatagaaagaaagagaaataccaaaaccttggcgcatcatattctttattccctcacttggatcgttaattccgcgaacgagcttctgcccttcaaattaaccatggagaatattggtgaggagtacggctactggccggagaacgacatgcttttccaaaacgaagaccttggcagctgggcgataatggatgaggcagcgttatcagggtcagggtactatgattcaagctccccggacggtactggtgcttc

SEQ ID NO: 22244 - DNA, 267 bp, Glycine max
  Clone ID: 701099815H1
tttttacttgaaaaaatcattatctgtgtatttaagaccaatccaaaacaaaaaaggtaaacttgtattttaactaattaaaaaaaactattttctctttcacaagttctgatccccgcagagcctcttttctctttcccatcaaaacccttttctctttcacacactttgatccccgttgatgcttgtttcagatctccaatcagaattagcgagacctccgatcagcgatgacacaacaacccacccttccttgcgaaccctcgt

SEQ ID NO: 22245 - DNA, 265 bp, Glycine max
  Clone ID: 701099835H1
taaagacaaagatggtgaggagccacttggtataggccttcaggtgatgctagcagcagctttctcattatttggtatgatcttattaatcatcatcttccatttttgtgtaaaatatttcattagacgccaacaaaggagacgccaaaacgaccttctttatcaaatcagcactcaaattgcaccaattgatgtgagttctgtggagccacgcaactctggccttgaccctttgatcatagcttccctgcctaagctcttgtac

SEQ ID NO: 22246 - DNA, 87 bp, Glycine max
  unsure at all n locations
  Clone ID: 701099771H1
ctttcgcaccttgcagaatcaattttntctctcaatcgtctttcatggctcgtnccnngcacacannctcgaantncaccggtgnga

SEQ ID NO: 22247 - DNA, 280 bp, Glycine max
  Clone ID: 701099751H1
gcgcagttccctacctctcctttcaagatgcagatcttcgtcaagaccctcaccggaaagaccatcacccttgaggtggaaagctctgacaccatcgacaacgtcaaggccaagatccaggacaaggaaggaattcccccggatcagcaacgtctcatcttcgccggaaagcagctcgaggacggccgtaccctcgccgactacaacatccagaaggagtcaacccttcaccttgtccttcgtctccgtggtggcatgcagatcttcgtcaagactctca

SEQ ID NO: 22248 - DNA, 253 bp, Glycine max
  Clone ID: 701099580H1
ctctcccatcacttctgtgtttctctcttcacctacactttcctctttcaattcaattcaattcttctttttggttcagaaactctgtacagttaatcaaaccctacctcacctcaccggttttagctgttaatttaatatatagatagaaatccaaggaagaagatgaagcagtttgccgtccaaaacgtcgtcgttccatcccacgatgagattagcgttgtttgccccaagccccgcgcctcggcctctt

SEQ ID NO: 22249 - DNA, 259 bp, Glycine max
  Clone ID: 701099584H1
aaacgtgtgaaaatgggtcacatatatggcacggaatttaacggccgattgagcactcatgacagtggtaatggtaatgccaccaggattgaggactctaatgctgttactggcttataaacatcctttttttaactagataacatggaagaactagatttccatggtgcagatgaatacataaagttataaagttatagaaaccatttttcttattcatttgtctgataaacttcagctctacaaactataggctcta

SEQ ID NO: 22250 - DNA, 256 bp, Glycine max
  Clone ID: 701099589H1
ggcgtgagttcttcaaccagccacttgagatgaaggaagagtatgcaaactcccccaccacttatgagggatatggtagtcgcttgggagtgcagaaaggtgccaccttggattggagtgactacttctttctccattacatgcctccttcacttaggaaccaagctaagtggcctgcatttccagaatccttgaggaaagtgattgctgaatatggtgaaggagtggttaagctaggaggaggatactcaagatg

SEQ ID NO: 22251 - DNA, 258 bp, Glycine max
  unsure at all n locations
  Clone ID: 701099556H1
ggtggtgcaaagaaggttattatttctgcccccagtaaggatgcccccatgtttgttgttggtgttaacgagcacgagtacaagccagagcttgacattatttccaatgctagctgcacaaccaactgccttgccccgctcgccaaggttatcantgacaggtttggcattgttgagggtttgatgaccactgttcattccatcactgctacccagaagactgttgatgggccatcagccaaagctggagaagtggaa

SEQ ID NO: 22252 - DNA, 263 bp, Glycine max
  Clone ID: 701099368H1
cacaacgcaacattcctttaaaatatggattggttctcctggctttccaaaacaggccttgagccaaccctagtgtatgagtatggccttacttttgctcacaacgagcttgaagaagaagacataacatacttcaaccatgagtttctcatgagcatgggaatctccatagccaaacacaggctagagattctcaagcttgcaaggaaagtgaagggaaagagggcggcaccaccacgccctgtggcaaggctcatggtggc

SEQ ID NO: 22253 - DNA, 79 bp, Glycine max
  unsure at all n locations
  Clone ID: 701099294H1
aaaaaaatngcaacaaaaacanganaaaaggtncttcttccaatttatccctgntggnaggntacttcaatttcngccc

SEQ ID NO: 22254 - DNA, 270 bp, Glycine max
  Clone ID: 701099303H1
cagagggagtagcggcattaaaaatgcagatcttcgtgaaaactctgacagggaagactataaccctcgaggtcgagagcagcgacaccatcgacaatgtcaaggccaagattcaagacaaggaaggtactacacataaattccaaactccattcaacgaatcgcgttttcaattttccataacctaaaaaatctctcgtttgaatttttcaggcattcctccggatcagcagcgtttgattttcgccggaaagcagcttgaagatggac

SEQ ID NO: 22255 - DNA, 247 bp, Glycine max
  Clone ID: 701099293H1
cgagaacccaatgttgtcctcgtctgtgtctggcgaatcttcttcgcctgaatctggtgttactttcttggatttctcggacttctcggattctaataatcagtgggatgaaatggagaattttgggttggagaagttcccttctgtggagattgattgggcggcaatatgactcgctgaattttcgttacgtcaaatggttggtttggctttgctctgcttttgggtttagtatgtatctactact

SEQ ID NO: 22256 - DNA, 253 bp, Glycine max
  Clone ID: 701099260H1
ctcagttctcaaccttcactcaaaccctccaagcaaagaacccttcagtgaagacccttttgtccataggcggcggtttcggtccttctttggctgcaaatttctccagaatggcaagacaagccaacaccagaaaatcattcatagactcttcgatccaacaagccagatcgaacaacttcctcggacttgacctagattgggagtacccttcctcggacacagacaagaccaactttgcatcactcatcaa

SEQ ID NO: 22257 - DNA, 253 bp, Glycine max
  Clone ID: 701099261H1
cttggagaaggaaaagaaggagagaagcttagcattgactgagaaccaaccattacctcagttgtgtagcagtaccgacattcgtcccttaaagatggaagattttatatatgcacatgagcaggtttgtgttagtgtatcatcggagtcaacaaacatgaatgaactactccaatggaacgacctttacggagaaggtggatcaagaaaaatgagatctttgagctatttcatgtaaagcttcctgtatagc

SEQ ID NO: 22258 - DNA, 254 bp, Glycine max
  Clone ID: 701099263H1
ccagcaccgcctccaggccttaatcgagggcgcccgagagacctggacctacgccatcttctggcagtcctcttacgactattccggctccactctcctcggttggggcgacggttactacaaaggcgacgacgacaaagccaaggcaaaggccaagtccaaagccacctccgccgccgagcaggaccaccgcaaaaaggttctccgggaacttaactccctcatctccggctcctcctccgcttccgcctccg

SEQ ID NO: 22259 - DNA, 257 bp, Glycine max
  Clone ID: 701099264H1
tagaaacattatagaatacccaatgtttgtgcctgcaaccaacttaagaaacgttgttcggaatccagctagaacttcaaataatgcaaatttaagtattccaggaaatgttggttcttcatcgcggacaggctcaaatccagctgtcaatccaccacctgcttcggcgtgggtttctcgccctaatcctcagcagtatccgcgcagattatctgaatatgttcgtcggtccttgttttctcctggtttggaagctg

SEQ ID NO: 22260 - DNA, 250 bp, Glycine max
  Clone ID: 701099276H1
gcgactcagcccctggatacagcctcttcaaggatgcagacaagtgaatttggaaagtctaaagggctactgaagacccttacagaaggaacctggagtgatgcatttgatggcctcggtatttccttgctgctgacatcaaaccctgcaattcagtatacggtgtttgatcagctgaagcaacgagcactgaagaataaacaaaacaatgctgataaaggaacatctccagcatccctttccgcattta

SEQ ID NO: 22261 - DNA, 248 bp, Glycine max
  Clone ID: 701099292H1
gcccttgctggcacagtggacattgactttgacactgaacccattgggatagggaaggatggaacagagatctccttcaaggatatttggccatccagtgaagaaatagcaaatgttgtacaatcaagtgtgctgcctgatatgtttagggacacatataatgcaatcacccaagggaatcccatgtggaataatttatctgttccaacgggcactctttatgcttgggaccctacatcgacttatat

SEQ ID NO: 22262 - DNA, 267 bp, Glycine max
  Clone ID: 701099233H1
ctttatccaataataataactccattttccctctgtcttccccccctcctctacacaaaaatatattattagcatggagaaggtgaattttgtgaagaatggagagcttagattgcctccggggttccgtttccacccgactgatgaggagctggttctgcaatacttgaagcgcaaggtcttctcctgccctttgccagcctctatcattcctgagcttcatgtttgcaagtctgatccttgggatttgccaggtgatttggagca

SEQ ID NO: 22263 - DNA, 257 bp, Glycine max
  Clone ID: 701099239H1
caaggatagtagcccgcccgcacctttaggaaacaaactatttcggagaaaaatattgttgtaaccttaaaaatgttgtaagcagatgcttttattttcgttgatcacaacttatgctgacattctcaggttcagcacatagataggccattaccataattatttttgtggtgtagggcttttaccttgttatttgaaaggttggttgaattttagcttcctacacggtaacattgaaccaccatgtaatgtaactc

SEQ ID NO: 22264 - DNA, 254 bp, Glycine max
  Clone ID: 701099243H1
gggtaacttaccaaccctaaggagttgttgagtttggtacatgggcggagaagtgttgacgatggcggacgtcacggccaacttgcaagcagcaaccaccgcatccaccccttacgcgcttcccaccaatctccctctcctctccgcttttctctccttcgctctcgctcagttcctcaagatcttcacctcctggtataaggagaagagatgggattctaaaaggttgcttgattcgggtggaatgccttcgt

SEQ ID NO: 22265 - DNA, 255 bp, Glycine max
  Clone ID: 701099245H1
ggacggccgcaccctcgccgactacaacatccagaaggaatcaacccttcacctcgtcctccgtctccgtggtggcatgcagatcttcgttaagaccctcaccggcaagactattaccctagaagtcgaaagctccgacaccatcgacaacgtcaaggctaagattcaggacaaggagggaatccccccagaccagcagaggctgatcttcgccgggaagcagctcgaggacggacgcacccttgctgactacaa

SEQ ID NO: 22266 - DNA, 247 bp, Glycine max
  Clone ID: 701099193H1
tgcttctaacgtgagatctcagattgcaattgcctcttctcttctcccagaatcggtgtaggttacaggtttaagggttttgttttcatttaggtcactaatccgatatcatgaagctcgatacgactagtctcgaatcgtttcccacactgattgcacctcaaaacgacgtcgccggagaactctccgccgctccgttctttgaccttccgaattccaatgacttcgatgggttcttgaaagacgc

SEQ ID NO: 22267 - DNA, 248 bp, Glycine max
  Clone ID: 701099194H1
ctcgtcttcaatcctttcgttattctcttattcatccttctcttctgaataatccagatctctttctgcccttttctccgtcacgcttttcgtgaccggatctgtatggatttgatccagatctacacgccgatggtggttttggccggatctggtgcgtagaggctcagatctacggtaccgaggtgtgtgattcatgttcgtcttgcttttggaatctgtttcgtagaaagtcgtttggtcttgca

SEQ ID NO: 22268 - DNA, 272 bp, Glycine max
  Clone ID: 701099201H1
gggcttctttcattcatgatggacaacagtccaaccactggcagtgtaaacaccaccactgctgagaagcagcgtctagcaaaatcttccctttctttcaactgtaagaatgctacattcaggaagatgttccctgagtatgttgagaagtacaaccagcaacagctttctgagcaggctgctccagagagggtctcatcggatacgtctcccgacaagagttcaaggccagttttggaaaagaaattagaatccaatggagaagacatgag

SEQ ID NO: 22269 - DNA, 268 bp, Glycine max
  Clone ID: 701099202H1
atcaagttgttgcacaaatcattatgggtactctcatgcttctcaagaagttcaccctcctctttctcctcatttctggatcacttttatcaacttcctttgcaggtagagtacgatccaactctatcaagaacttcgctaaagatgtgaatgcaatcgaagagggaacaccaaggaaaccactgaataaggaagaagtaagaaccatccatgagaggcttcttagggctaacacaaaagattatggacgatatgatccatccccatc

SEQ ID NO: 22270 - DNA, 262 bp, Glycine max
  Clone ID: 701099207H1
gtttgacagcacagcactcggaaatttctggcgatctctgcgttttcccctattttttctgaatctaacaacaaacattcctctggcaacaatcaatactattaataagagttccttccttcactctcacccaagccaaagaaaggaacaagaacaagaccaacaaagtaacgtgaaagagaaagagatggaggaaattgttccagtggtggatttccagaggctttcagaggaagaggagcgcaagaagctgagaaaaaca

SEQ ID NO: 22271 - DNA, 258 bp, Glycine max
  Clone ID: 701099209H1
caagaactagctataggcctcaattagttattatattaatttggtctaagtagttgttattacttgtgtagtagttcttctccaatggctgatttaggttcagcctcttccaagagaatgtggtgttccgttccagaaagaatgcagcttcacttggccatgttggccttgcagtttggctatgctggattccatgttgtctcaagagctgcacttaacatgggcgttagaagcttgttttcccagtctatcggaaca

SEQ ID NO: 22272 - DNA, 257 bp, Glycine max
  Clone ID: 701099214H1
caaagtttgggattgtcaaaatggaaaatggtaatgtgatagtgaacggttcccctgaatatgttcggtcctgttgcgagggtagcctccaacgccttggtgtcagctacattgatctctattatcagcaccgtgttgacacaactgtacccattgaagacaccatgggagagcttaaaaggctggtccaagagggaaaaataaggtacataggattgtcggaagctagccctgacacaattaggagggcacatgct

SEQ ID NO: 22273 - DNA, 267 bp, Glycine max
  Clone ID: 701099217H1
caatttaccagctatacttgttccttttgaaggttagaagtgctacaatacaaacaatggcagctactcaggaagatgtgaagcttttgggtattgtgggaagcccatttgtgtgcagggtccagattgcccttaagttgaagggagttgaatacaaatttttggaagaaaatttgggcaacaagagtgatttgcttctcaaatacaaccctgttcacaagaaggttccagtgtttgttcacaatgagcagcccatagcagagtctc

SEQ ID NO: 22274 - DNA, 248 bp, Glycine max
  Clone ID: 701099190H1
ggagaacaagaagaaaaaaccgacacaaagatctagtcctagctagaatcaaacaggggcgatctcaccttcaagaacacatcgccatggcaaggaacttgcttcttgtgctttttgcagtagccaccctcctccatggctcagcagcccaaaccagacacatggtcggtgatgccacgggctggatcatccctgctggcggcgctgccacctacaccgcctgggcttccaacaaaaccttcaccgta

SEQ ID NO: 22275 - DNA, 250 bp, Glycine max
  Clone ID: 701099170H1
gtggaggaattgaaattgaagacaactgggataaggttaagactgcatttgttccaacaggagtgtctcttacgtcagaaattgttgccccacttgttgcaacccttcccttggagatcaagggagaaattgaggagtttctcaaagtggttttcactctgtttcaagacctggattttactttcttagagatgaatcctttcacattggttgatggaaagccttatcctttggatatgagaggcgagct

SEQ ID NO: 22276 - DNA, 247 bp, Glycine max
  Clone ID: 701099174H1
tttaccagctatacttgttccttttgaaggttagaagtgctacaatacaaacaatggcagctactcaggaagatgtgaagcttttgggtattgtgggaagcccatttgtgtgcagggtccagattgcccttaagttgaagggagttgaatacaaatttttggaagaaaatttgggcaacaagagtgatttgcttctcaaatacaaccctgttcacaagaaggttccagtgtttgttcacaatgagca

SEQ ID NO: 22277 - DNA, 254 bp, Glycine max
  Clone ID: 701099113H1
gaatgatttaccaggattgactgatgttgagaagccaaggatgagaggcccaaagagagcatccaaaatccgtaaactgttcaacctgtctaaggaggatgatgttaggaagtatgtcaacacctaccgtcgtacatttacgacaaaagctgggaaaaaggtgagcaaagctcccaagatacaaagactggtcactcctcttacgctccaaagaaagcgggcaagaattgctgataagaagaagaggattgcca

SEQ ID NO: 22278 - DNA, 267 bp, Glycine max
  Clone ID: 701099076H1
cagcaagatcgatctctgtccagtcgaatcttcccaacatggccgactctcaagttactctgcgcacgcgcaagttcatccgcaaccccctcctcggacgtcgtcagatggtcgtcgatgtcctccaccccaaccgcgcgaacgtttccaaggacgagctccgtggcaagctcggtgagctgtacaaggccaagaaggacgatgtctccgtcttcggtttcaagacacacttcggtggcggcaagagcaccggcttcgctctcatct

SEQ ID NO: 22279 - DNA, 267 bp, Glycine max
  Clone ID: 701099093H1
gagagatgccacccacaagacaagaaagcgttgctccaactccagaaggacctcggcaacccttatcacatcatatcctggaacgcaaaggaggattgctgcgagtggttctgctgcgttaagtgtgacgagaaaacaaaccgcgtcattagcgttgccttatcatccccttttccagacaccaatctctcggcccaaatacctccctctgtgggtgacctcccttacctcgagtccctcgtcttccacaaattccccaaactcgtg

SEQ ID NO: 22280 - DNA, 272 bp, Glycine max
  Clone ID: 701099069H1
ctctttattactaacatttcttccattcttagcttttgtttgtcccatcaaatttttgaagatggccaagagaagtgttgctgctaattcttcttttgagagtactagcttggcttctctggatcaaaagttggccatggccaagcgctgctctcatgacggtgcgatggcaggagccaaggcagctgttgctgctactattgccactgccattccaactctggctagtgtaaggatgctaccttgggcaagagcaaatctcaatcacactg

SEQ ID NO: 22281 - DNA, 271 bp, Glycine max
  Clone ID: 701099026H1
gaaaattggttcttctgaggagagtagctacccgaatggatcaactctactgctctgttgcccacttgaaaacgagttctggggcttggattttcatttttccttaaagcactgcactgtggtatttgctccaatatgtagttaatgtgtgaactggttcatatttcatactatatattttcaaggtggggtgcagaagcagcgtgcggccaatctgctgtgttaatgtgtttttttgttttttatcgtttccgatttgtttttgaagtac

SEQ ID NO: 22282 - DNA, 269 bp, Glycine max
  Clone ID: 701099027H1
ggaagagggtggctgttgttaacatcgtattccttgttcttctcattattgtatactccatagggtgctgtgcattcaggaacaataggagggaaaattggaagggatattctcgttagctagattactcagtattactagtgagtagatcagtttgctagacaatctggtttatatgttggatttatttttttgggctttatgtgtatgctggattatactgttttcagtacagtctgttatggaaattgctcaattttatatagtag

SEQ ID NO: 22283 - DNA, 272 bp, Glycine max
  unsure at all n locations
  Clone ID: 701098971H1
aacattataantnntattacatacattntgtagctacgatgagcaagttactactccattcgtnttgctgggttcgtggcnacctttgtgcnncatggngatnatgatggtgcccanaaacgngagtncccaaaacataggngatgacatcgtcacacnagacttcttcaacagcataatcagtcaggcngatgatggttgtncagggaagaattctactcacgagatgctttccgtaatgctcacaattcctacaatgngtttggtnggct

SEQ ID NO: 22284 - DNA, 283 bp, Glycine max
  Clone ID: 701099003H1
ggttgatgtcggagttgcgtaaaatggtctccgtgtctggtgatccaatccaacgactgggagcatacatgttggaggctcttgttgcaaggctggcctcttcaggaagcacaatctacaaagtcttgaaatgtaaagagcctactggtagtgaactcctttcacacatgcatctactttatgaaatctgtccatatctcaaatttgggtacatgtccgcaaatggagctattgctgaagccatgaaggaggaaagtgaagtccacattattgattttcagat

SEQ ID NO: 22285 - DNA, 256 bp, Glycine max
  Clone ID: 701098641H1
ggaatacaagacaccaaatctgattctgccaaaaatatgctgcctaacacgactgttgattcaataaccaaggaagaatctcgtcccccatcgccagttcccagattaacaaagacagaactcatctcatctgctttgaaacgccttggtgagcttgaagagaaggttgacatactgcagtcaaaaccaaatgtcatgccatatgaaaaagaggagctgctgaatgctgctgtttatcgcgtggatgcattggaag

SEQ ID NO: 22286 - DNA, 263 bp, Glycine max
  Clone ID: 701098648H1
ctagaaagttagaaaacatggcagcggtggccggagcatcctcgtccgtgattaaggtggctgcactttccggatctttaaggaaaggctcttacaacagagccctcattcgttctgctattgagctaagccaaggtagagttgaaggccttcaaatcgagtacgttgatatttcgcctttgccccttctcaacaccgatcttgaggtgaatgggacctaccccccacaagttgaagcctttcgccagaagattctcgcagct

SEQ ID NO: 22287 - DNA, 258 bp, Glycine max
  Clone ID: 701098650H1
tgcagaaataactgacaagcttggacttcattcactccgtcaacgccactggtatatccagagcacttgtgcaacttctggagagggtctctatgagggtttggactggctttctaacaacattgccagcaaagcatgagacatttgaaaaattttggtcttgtctggtgatttcatgcgagtctggcggttcttggagaaagatgcttatcttttctagcgaatgttgtaatagcagaatgcttgctagaagtattc

SEQ ID NO: 22288 - DNA, 256 bp, Glycine max
  Clone ID: 701098607H1
cagtggcactagcaacggcatccgaaacagtgattgtgctaaaagcaatagcaatgtcaatggccataacaacagcagctgcaagagtgatggtgctaaaagcaataacaattacactcgcaacagttagggtgccagtagcaattacagccaaaccagtgaggacgctaaaagcaatgccaatggcaataacaatagcagctgcaagagtgatggtgctagtggcaatggaaagagcaattacaaccgcaacagt

SEQ ID NO: 22289 - DNA, 258 bp, Glycine max
  Clone ID: 701098612H1
tttggatgcccagagaaaaggcgagatcaacgaagacaacgtcctctacattgttgaaaacatcaacgttgctgcaattgaaacaactctatggtcgattgagtggggcattgctgagcttgtgaaccacccagagatccagcaaaagttaagggatgagattgacagagttcttggagcagggcaccaagtgactgagccagacatccaaaagctcccatacctccaagcagtggtcaaggaaactcttcgtcttag

SEQ ID NO: 22290 - DNA, 253 bp, Glycine max
  Clone ID: 701098638H1
agaaaatcctcacccattttcttcgtagccaaacactctgaaattctcagttatgtcgtggcaagcgtatgtggatgatcacctactgtgtgaaatcgaaggtaaccacctcactcacgccgctatcatcggccaagacggaagcgtttgggctcagagcaccaacttccctcagttcaaacctgaggaaataactgccatcaataatgactttaatgagcctggatcacttgctccaactggattgtatatc

SEQ ID NO: 22291 - DNA, 253 bp, Glycine max
  Clone ID: 701098639H1
gcgccatggaaaccataagctcatcgtgccattggttatttctttctagcaagtaccccagatgatatgagtgcaccgttaaccttcgttgttttgtatcaacttgaagatcagggtaattttgaagaaaaaaaagcttggagaagtggagcttggccactgaatatagctgcctggggccaatgatcgactcaagattagcattaagaattgataaagtggtacttgagagtgtgtctctttaaatttttgt

SEQ ID NO: 22292 - DNA, 272 bp, Glycine max
  Clone ID: 701098586H1
gggacccaacactggttaatccctgtacttggtttcatgttacctgtgactccaacaatcatgtgattcgcttagacttgggcaactctaacgtttctggaactctgggcccagaacttggccagctacagcatctgcagtacttggagctctacaggaatgagataacaggaaagattcctaaggaacttggtaacttgaaatcacttattagcatggatttgtatgataacaagttggagggtaaaattccaaaatcatttggaaagttg

SEQ ID NO: 22293 - DNA, 272 bp, Glycine max
  Clone ID: 701098591H1
cagagatcggaacgtggaactgcggaaaccggaatatctcacttctcagatcagatcaatccgacgtcgttgcagttataatggctccattcagcggcgatgagacggcaccgtttttcggcttccttggagccgcagctgccctcgtcttctcctgtatgggagctgcctatggcacagcgaagagtggcgtgggcgtggcttcgatgggtgtgatgagaccggagctggtgatgaagtctattgtccctgttgttatggctggagttttg

SEQ ID NO: 22294 - DNA, 274 bp, Glycine max
  Clone ID: 701098539H1
ggccaaatcaatcaaattctttgagttgaacacaggggccaagattccttctcttgggttagggacttggcaagctgaacctggtgttgtagctgaagctctcaccacagccattcaggttggatacaggcatattgactgtgctagtgcgtataagaatcaagcagagattggttctgctcttaagaagctttttgatgatggtgtggtgaagcgtgaggacttatggatcacttccaaactctggtgttcagatcatgcaccagaagatgtg

SEQ ID NO: 22295 - DNA, 276 bp, Glycine max
  Clone ID: 701098552H1
ccatcatgtctgtctggaaacttgaaacaggttgattttaacgctgaccatattgccaatcctatattacaagggagaaatataacttctgaaggaagagattctataggtgttgggatcagtgagaactcggcattggtcccagaacatgattcacacgagactgaatttgtggaagtagccttaacaaagcaaaatgaagatgttgggatatctttcaaggatggccactgcaaaacacaggagcctgatgaaagtgacgtgttaactgaagtt

SEQ ID NO: 22296 - DNA, 278 bp, Glycine max
  Clone ID: 701098504H1
ggcacttctctcattcaagagtaatggcagaagcaacaaaagggtatgctgtggtcactggagcaaataagggaattggatttgcaatatgcaagcaattggcttctaatgggatcactgtggtgttgacagccagagatgagaagaggggtcttcaagctgtcgagaaactccaagagcttggtctttctggccatgtgggttttcatcaacttgatgttacagaccctgcaggaataagatcacttgcagatttcatcaggaacaaatttggaaaa

SEQ ID NO: 22297 - DNA, 278 bp, Glycine max
  Clone ID: 701098505H1
aacaaaggcagaagcgagatctcctagaaagcgagtttctcttttctctctctctttcaattttcacatagtcagcgaaaacaaacaaactattggagatttggagcacgaaacacaacacaagcagcagccacctcgtttcattgttttgaattcaactgagaaaaacgacaacgaggatgtttcaggagagcagcgtgacgcggtggccgactcagtggactcgctaccacgacaagctattcgagcgggcccttctggtcgtgccggaggatctg

SEQ ID NO: 22298 - DNA, 256 bp, Glycine max
  Clone ID: 701098405H1
cgcttctcaaatccatgtttcctctgggaaactagtccctggactatcatggaattactatttgttgacatgtcccaagcttgagaggattataaggaagcatcttgaggatgtcttcgagaaggacagtggagtagctcctggcatacttcgactcttcttccatgactgctttcctaatggatgcgatgcgtctatattgttgaatggagacggtgacgagaagcaacaccgtgctaactttggtttaaggcaa

SEQ ID NO: 22299 - DNA, 257 bp, Glycine max
  Clone ID: 701098389H1
ctgatggacaagttcaatgaggaaattcagctgaggggattgaaggatcagatatctgttttggcctgttctcatatcggtggccataagtatgctgggaatgtaatcatattctctccaggatcagatggaaaaatcatgggtcattggtatggctatgttactccggatgacgtggcagccttgttggaccgacaaattgccaagggagaggtcataaaaaaactttggaggggtcaaatggggccacccggtgc

SEQ ID NO: 22300 - DNA, 266 bp, Glycine max
  Clone ID: 701098380H1
gaagaagaagatgatctatcggaagtggagtctccttaccggcccggtcaccatcctcggcggcgtagtcgtcgccatcgccgccgccaacgttatcttcgtcaagaatgatccattcctcaaaccagaggagaggaactatgaaaatcagcctgctaccaagtaggagaaaagagacaacagaagtttgcgttttgatgtcatttaaaccctgatttatgagctctgtatactgttttgcaagatacgctctcgctagttaataa

SEQ ID NO: 22301 - DNA, 266 bp, Glycine max
  Clone ID: 701098325H1
gtgggaggtttaaattgtattgatcttgtggtagaactggttcgccgctcagcacatgaaatccctctccaaacgcctccgcaaatatgggctccgatacgacgatttgtacgatccttactacgatctggatgtgaaggaggcgctgaatcggcttccgaaagaggtggtggacgctcgccacgcgcgtcttaaacgcgccatcgatctttccatgaagcacgagtacctccctgacaatctgcagtcaatgcaaacaccattca

SEQ ID NO: 22302 - DNA, 267 bp, Glycine max
  Clone ID: 701098293H1
gttgtattttctcaattacaacatcgtattctgcaaattcaaaccgggtcttggttttctgaaagatgggaggtggcaaggacaagcatcatgatgaatctgacaaaggaattttttcacaccttgctcatggggtagctggtgcagcacatggtggacatgggtacccacctggggcttacccaccaccacctggggcataccctccacaacaaggatatcctccagctgggtatcctccacaacaagggtatcctccagctgggt

SEQ ID NO: 22303 - DNA, 273 bp, Glycine max
  Clone ID: 701098215H1
caggtggtgcatgatgtggatttgcagaagctgcctgtaagatttgcaatggacagggctggattagttggagcagatggtcccacacattgtggttcttttgatgtcacatttatggcatgcctgcctaacatggtggtgatggctccttctgatgaagccgaccttttccacatggttgccaccgcagcagccattaatgatcgacctagttgttttcgatacccaaggggaaatggcattggtgttcagctaccaactggaaataaagga

SEQ ID NO: 22304 - DNA, 265 bp, Glycine max
  Clone ID: 701098023H1
gggacgtgttgagaccggtgtcttgaagcctggaatggtggtgacttttgcaccaactggactgacaactgaagtcaagtctgtggagatgcaccatgaatctcttacagaggcacatcctggtgacaatgtgggattcaatgttaagaatgttgctgttaaggatttgaagcgtggttatgttgcctcaaactcaaaggatgaccctgcaaaggaggctgtaacttcacagcccaagtcatcatcatgaaccaccctggtcaga

SEQ ID NO: 22305 - DNA, 272 bp, Glycine max
  Clone ID: 701098003H1
cttatagcggtctttgacggcaaagagagacacaaacgtaatctgtgagtttggaacattgattcgttgtttcctctgcaaaatcaaatcctcattgtgattgttgatgaacaattgaagtatccctccgatttgaagattccggtgacggcgagccatggccaccggcggcgacggtgacacttccaaacaagagctcttccagctcatcaaacgcttcggagcttacgtcactttcaagatctccaatctcttccctctctctctccaca

SEQ ID NO: 22306 - DNA, 71 bp, Glycine max
  unsure at all n locations
  Clone ID: 701097807H1
cnagatgngnacatacntcaattcanacacancncgtacaggaccttcgtgcagttcacaaaccanaaaac

SEQ ID NO: 22307 - DNA, 104 bp, Glycine max
  unsure at all n locations
  Clone ID: 701097812H1
gctcgaggnanctgtcggtggcaaatttgcnttgttcttcgcggcacacctnaatcattgaaccgcaagtnnngcggacaaggatgntcacactccgnaaccng

SEQ ID NO: 22308 - DNA, 268 bp, Glycine max
  Clone ID: 701097696H1
cttttcaaggttgagaacaaccaagaaccagagcgacacaagcacatgactgtctctcttcctaaaccgaatgaactgcgacctttaaaccaatcttcttacataatggtcgtttgaaaatctcgtattttcatctgggtttccttcaaaatcatttttttttgtttccctttcttcacttcctctgcccttcttgtcttggttcttctgttttaagcagctttctcttgttgatcattaatcatgtcaatatttaaggctttgaagc

SEQ ID NO: 22309 - DNA, 155 bp, Glycine max
  unsure at all n locations
  Clone ID: 701097701H1
tcagaacctagcttggacnanacnaactatcanaanacggaacnntttcntctcttgnatttaaanncgagataaatatagattctggggggattgttggattctgggtctcgttgggtnagattcatcanaacaaccctttggattctttcttg

SEQ ID NO: 22310 - DNA, 256 bp, Glycine max
  Clone ID: 701097543H1
gttttcttttcgttcgcatcttctctctctctcagaaagatgaaggtggtcgccgcgtatttgctcgccgtcctcggtggcaacaacagcccctccgccgatgtcatcaaggaaatccttggctccgttggagtagaagcagatgaagataggattgaatcgtttttgtctgaagttaagggtaaggatatagttgagcttattgctgccggtagggaaaagttggccacggttccttctggtggtggtggtgccg

SEQ ID NO: 22311 - DNA, 262 bp, Glycine max
  Clone ID: 701097509H1
ggttataccgattagtgttactaaaacaacgtttttgtgatatcgagaaaaaagaaaaataaaaagtgatgtcgaggagaccggggaatccttatagaaggttcggtgacagtggcggtggactgttctcgaaatctaggtcgccaccggttttgtctattgcgctcgtagttgtgggaggtttgtttctcgttggctatgtgtatagaggctcaggtggaattggaaaccgtatagaatctgttagcagggttgaaggtga

SEQ ID NO: 22312 - DNA, 259 bp, Glycine max
  Clone ID: 701097512H1
gaaaagaccatcaaagtttcacttcagccttatccggtttagggtttcggtttttgacccaacctttgacgtatcgaaaccttaagtttcggatcaggtctgagcaatctggttggtagaacctttggtcttagagagtcaagttttatgtctgaattagacgatcaaattcctactgccttcgatccttttgctgatgcaaatgctgatgactcgggtgctgggtcaaaggagtatgtgcatattcgcgtacagcagc

SEQ ID NO: 22313 - DNA, 49 bp, Glycine max
  unsure at all n locations
  Clone ID: 701097468H1
ggagctntaccancagtacagaanttcaattgcnttccagccgtgnaat

SEQ ID NO: 22314 - DNA, 172 bp, Glycine max
  unsure at all n locations
  Clone ID: 701097481H1
caaggaggaannnaccaagttggggacggtcattgcnattnatctnggnacgacctatttcatgtgttnggtgtttacaagaaacgngccatggttnaaatccataggccaantgnaccaaagggnagccggaatcnacccccttcnttgnggttgccttncaacnngacna

SEQ ID NO: 22315 - DNA, 202 bp, Glycine max
  unsure at all n locations
  Clone ID: 701097483H1
gtaacttctgaagatgaagttgtccgtttgttgaactgctctgatcattatgcagcactgggatcatgcggtatcaaaatattgatgttcatactaaagcgggaatacaggaaangcatgtggacnctataaatatggtataaagtcgagcttagaactcnatntatcatctatgatcgtaaggaagctantgnggcagagg

SEQ ID NO: 22316 - DNA, 263 bp, Glycine max
  Clone ID: 701097448H1
ctcttggtgagatgaatggtaaaatgtttgctggaaaacctctgtatgttgcccttgcacagagaaaagaagagagaagagcaaggttacaggcacaattttcacagatgaggcctgttgcaataacgccttctgttgcgccccgtatgcctctctaccctcctggtgctcctggtcttggacaacaatttttgtatgggcaaggacccccagccatgatgcctccacaagctggatttggttaccagcagcaactagttccg

SEQ ID NO: 22317 - DNA, 57 bp, Glycine max
  unsure at all n locations
  Clone ID: 701097449H1
tatcanacaanccattccanttctcgtgaactccattccattncttctctngctccc

SEQ ID NO: 22318 - DNA, 253 bp, Glycine max
  Clone ID: 701097284H1
atccttgaggaaagtgattgctgaatatggtgaaggagtggttaagctaggaggaaggatactcaagatgatgtcaataaaccttggtttgaaagaagatttccttctcaatgcatttgggggagaagtgaggttggtgcatgcctaagggtgaatttctatccaaagtgccctcaacctgacctcacttttggactctcccctcactcagatcctggtggcatgaccattcttctccctgatgattttgtgt

SEQ ID NO: 22319 - DNA, 250 bp, Glycine max
  Clone ID: 701097286H1
agtagccctccaccctcccggttgaagaggttcaatgataaagaccaaatggagtacactgaaatattgaagatgcgcggccttcctttccaagtgacaaaatctcaaattgttgaattctttaagatttcaagctgatagaagatagggtacacattgcgtgtcgtcctgatgggaaagctactggagaggcatatgtggagtttgtttctgcggaggaggctaagagggcaatgtccaaggataaaat

SEQ ID NO: 22320 - DNA, 248 bp, Glycine max
  Clone ID: 701097287H1
caacattttcgaagggttcgaaaccatagaaaaatacgtaggggatcgctacaatagctggaagcatgcgtacattggtattattggagcattggctggcattgctgtctttttggaagctttccatggatcatagtcttcaagaggaggaagtcagagaacaagattccacacggagcaaatggtgctaatgggtatggttctaggccacaacaggtgtaggatacgatgtgtagccagataaatat

SEQ ID NO: 22321 - DNA, 252 bp, Glycine max
  Clone ID: 701097255H1
caccaaaacaatttgctcacaaaggaggaaaaatggcacctttcgtttccctctctttgttgcttctctttctcaaccaccccctcctttccctctcaaccaaccctgaagggaacgctctgcatgcttgagaagcaggctttctgatcccaacaatatgttgcagagttgggacccaacactggttaatccctgtacttggtttcatgttacctgtgactccaacaatcatgtgattcgcttagacttggg

SEQ ID NO: 22322 - DNA, 251 bp, Glycine max
  Clone ID: 701097257H1
agatgaccttgttcatggactcaaagccttctccttaaccactgagagccttggttgtgttcaaagctctatatttaggagcatccatggaaatatgatcatatggtatggagcatggcagaggcggcgagtaaggaaaaagaggagctgacctcaacccttaaatcaatgctgaccagcatatcaagcatggcagtgttaattgaacacagtttccttgaagcatacggtggagaatcaagagatggctc

SEQ ID NO: 22323 - DNA, 253 bp, Glycine max
  Clone ID: 701097259H1
gttttacagtttgcctcgctgactttgagggagtttctgccatctttctaggactggaggatttggttttatgatattatcaaaggcacaatgcagaagtgtttgatgtgtgatattgtatttcacttaacactgtctgatataaaaagaaatatcttttgtttgtaatcatcatcctcgaattgcatgaaatcagtaacttagggatagacaactcaatttgaagtagcagaaataagacgattttgtttca

SEQ ID NO: 22324 - DNA, 254 bp, Glycine max
  Clone ID: 701097222H1
attcgaggcccattacgcgcagtcagaagagttcgaacaaacaataaccaaaaaagctcgtcgcgcggttgctgctgctacaggaactggttcggttatgttatatgaatccggttcggttcaggttcacctcgaaccgattcggaacccggttcgacggttcagaggagactatgggtgaaggaccggtcgaaggactggtgggagaagatcagccggaaggacttcccggaggaggagttccggcggtggtt

SEQ ID NO: 22325 - DNA, 258 bp, Glycine max
  Clone ID: 701097228H1
gagaagaagaaacttaatcgatcatcacttcacttcactaatacatcatggcagacgagacccagaacaagtatgagagctctgaggttgaggtccaggatcgtggtgtttttgactttctcggtaagaaaaggatgaagaagacaagcctcatcctcaggaggaggtcatcgccaccgagtttcaaaaagtcactgtctcagaccaaggagagaacaagcacagcctcttagaaaagcttcaccgatctgacagcag

SEQ ID NO: 22326 - DNA, 253 bp, Glycine max
  Clone ID: 701097243H1
taatgagttagttgacatatattcctttgggatgtgcatattagagatggtcacatttgaatatccttatagtgaatgtactcatccggctcaaatctacaagaaagttatttctgggaaaaagccagtgctttgtatagagtgaaggatccagaagtgcgacaatttgttgaaaaatgcttggtcacagtgtctctaaggctttctgcaagagagcttctaaatgatccatttcttcaaattgatgattatg

SEQ ID NO: 22327 - DNA, 263 bp, Glycine max
  Clone ID: 701097204H1
cttttcttctttctctttcccctcgaactcaaaaataaggtgcatggacgccggcggcttagattccgatggccgtgaattcaacaccgccgaggacatgtggagggaacaggcgggtgaccctagcaagaagaccagtggtatcgtgacggcgtctcctactgggagggtgttaaggcaaatatggatggggtattgggagggtttgcaaatgtgaacgagcctgacataagttgcagtgaggatttcttgaacattctctt

SEQ ID NO: 22328 - DNA, 257 bp, Glycine max
  Clone ID: 701097206H1
ctttaatgagcctggatcacttgctccaactggattgtatctcggtggcaccaaatatatggtcatccagggtgaacccggtgctgtcattcgagggaagaagggtcctggtggtgttactgtgaagaagacggtgcggccttgatcattggcatttatgatgaaccaatgactccaggtcaatgcaacatggtagttgaaaggcttggtgattatctcattgaacagggtctctaatctttgcttaatgtcttgtt

SEQ ID NO: 22329 - DNA, 256 bp, Glycine max
  Clone ID: 701097160H1
accccttaagaaagggttctcccatgtaccacatgtaatgataaggcaactgaatcttggcttatagacaaagtaagctcttcagtccttgtattcaagttctcattttccaatgccacagtagtttctgtggatttgctaaaagtatcagaaggaatgttgattccagtgaagccaatcatgacagctatcgctccaaggtaatccataaagcgcggagcattgccagtcaaggtatccacaatggcagccaatg

SEQ ID NO: 22330 - DNA, 257 bp, Glycine max
  Clone ID: 701097138H1
gaaaatcatggtggacgcagcagaacgtaggtacttggaggatgacgattcatcactcatgaaaactattaagggggcaacaactggtttagttgctggcactatctgggggaccgtagttgccacctggtatgatgtccctcgtgtagagagaaatgttgctcttccagggctgattaggactttcaagatgatgggcaactatggtttgacctttgctgccataggaggagtctacataggtgtggagcagttgg

SEQ ID NO: 22331 - DNA, 257 bp, Glycine max
  Clone ID: 701097112H1
tctgtttctctgtcttcattttagtttttacggctagaagaatgtccagctcatcggaatatttggtattttccggccaccacccggcgaactctccggcggaaaagtccactttctctcagacttgtagtctattgagccaatacatcaaggaaaagggtaccttcggagaccttaccctcgggatgacttgcactgccgaaacaaacggttcccctgagacatcgtgtcactctgcaacaaccatggagttgttt

SEQ ID NO: 22332 - DNA, 283 bp, Glycine max
  Clone ID: 701097034H1
gtgcctttggaagaccgaatactgattcttaagaagggttctaagcctgatgatcggatatggttcctggagattgacacccaatatgttaggcagcagcaaaaaattttggggactgaggtagttgcatggagtaaaggtgtgataggcaatgctgagaagcctgttgttattagtggtccttctggagtaggcaaaggaacactgatatcaatgcttatgaaggaatttcatctatgtttggtttttccgtgagccacaccacccgtgctccaagaggtat

SEQ ID NO: 22333 - DNA, 283 bp, Glycine max
  Clone ID: 701096963H1
gttgctcaaacattagttgtctatgctaaaacagacataactgctgggtcaaaaggcattactgcattcatcattgagaagggaatgcctggattcaatactgcccagaaattggataaacttgggatgcgaggaagtgatacgtgtgagcttgtctttgagaattgctttgttccagacgaaaatattcttgggaaagaagggaaaggagtctatgtcatgatgtctgggctggatctggagagacttgttttggcagctggtcctcttggtattatgcagg

SEQ ID NO: 22334 - DNA, 285 bp, Glycine max
  Clone ID: 701096940H1
cattcacaacacaacacaaccaaatccaacatggtagccattctgaagagacaaagagaaaccgaagccgaggagagcatcataagactggcagaaagtctcatgcaactgtcgcgagtccaacaaaaaagcaagcctcttctcaaaaccttttctccaacggagttcgagtgcaaaacctgtaaccgcaagtttccatcttttcaagcccttggtggtcacagggcgagccacaagaagcccaagttcgaaggtgaagaactcaaagaggaggccaagaagggt

SEQ ID NO: 22335 - DNA, 249 bp, Glycine max
  Clone ID: 701103692H1
agcagattcgccaatggcagaagctgttggagattgtgctctatgcattggggcatcagaggagcattggtgagggccaatttcgtagagccaagaaggccctcattgatttgcacatcgggatgcttgagatcaggactccaacgcatcaattgcacatcgaaaccggtcctttggccgcagcactggtagcagagacagtcatagtcatggtaacaatcatagcaataataatacctatcaccatcg

SEQ ID NO: 22336 - DNA, 249 bp, Glycine max
  Clone ID: 701103693H1
gcgtgtcttgtcattgcgtggcgttggacgttgaagggcgttgttatacatggggacgtaatgagaaagggcaactgggtcatggagatacgattcagcgtgataggccaactgtggtgtctgaactttcaaatacaaaattgtcaaagctggatcagggaggagccatacagttgttgttacggatgatggaaattccctagcatttggatggaacaaacatggacaactaggttctggttctgtgag

SEQ ID NO: 22337 - DNA, 253 bp, Glycine max
  Clone ID: 701103694H1
gtgaaggctgagtccctctggagagaagggtataggctccatgattccatgcttcctttgtttatactcacttcggttgcacagaggatattgaggaccgggaaatccattaattttcttcgcgtttgttgtaggatcatggttgggctgatgctgcgaccgaggttgttgctgatcatggagcaacggcgagaacaggtggttttggatatggagaaacggatacccttgagtttttggtggatgaagcttc

SEQ ID NO: 22338 - DNA, 257 bp, Glycine max
  Clone ID: 701103695H1
gtctaataaagttactccatgatagagctacacatagccatctgcatggacgtcactcagaaccctctccaattctcaccgccgtccttcctcgtacgtttcaatccgcctcctctccttctcctcaccggggaggatgtagcggaggctgccgtagatagcgccactccgcatggaaccgcccctctccgtcctgaaccgcacccaaatcgctccaaagcccctactatcaccctattatctagacgctaacaacc

SEQ ID NO: 22339 - DNA, 52 bp, Glycine max
  Clone ID: 701103696H1
cataatctgaatatttggatgaagtattgtgcaggaccttcacgggctgaat

SEQ ID NO: 22340 - DNA, 253 bp, Glycine max
  Clone ID: 701103691H1
gtgtttttgttgctcatatttggacaagagattgcgtgttttatggagattgtcgagataaggaaatgaagtgctagagggggatggcatgaagggacaagttgaattaaaagtagggaagggtgactgagacgaagcatcacattcactggtggttgttggcttgtccttgtgtggttctgctttatcttaatttcatgtcatgtgctgttcctcttcactcctcctttggtccttcatcactcatggaccc

SEQ ID NO: 22341 - DNA, 263 bp, Glycine max
  Clone ID: 701103664H1
aatttaccagctatacttgttccttttgaaggttagaagtgctacaatacaaacaatggcagctactcaggaagatgtgaagcttttgggtattgtgggaagcccatttgtgtgcagggtccagattgcccttaagtgaagggagttgaatacaaatttttggaagaaaatttgggcaacaagagtgatttgcttctcaaatacaaccctgttcacaagaaggctccagtgtttgttcacaatgagaagcccatagcagagtc

SEQ ID NO: 22342 - DNA, 268 bp, Glycine max
  Clone ID: 701103665H1
cattcggctcgagttccggcacttgtcaggcagagaacgattggtcttacatgaagtgcttgctggagttggacatcaagaatggcaagcgccctatggagattgatgatgttgaggaggatgagccccaccagccaaggaagtgtctaagaagttggattcttgccatagagttgaaatggctcgaatttcgtttcaacgtcaatctattgaggccaaggattctgttgttccccctatggatcaggagaccattgagccactgagt

SEQ ID NO: 22343 - DNA, 254 bp, Glycine max
  Clone ID: 701103666H1
gtaatttgtgtctgctcactcgctcttctccgccacttctgaatctattgaatcaacaatcatgtcggacgaagagcaccatttcgagtccaaggccgacgccggagcctccaaaacctaccctcagcaagcggtaccatccgcaagaacggctacatcgtcatcaaaggccgcccctgcaaggttgtggaagtttcgacttccaaaactggaaagcacggtcacgctaagtgtcactttgttggaattgatat

SEQ ID NO: 22344 - DNA, 249 bp, Glycine max
  Clone ID: 701103667H1
gcaggaggatcatacgaggaagccattgcagcgttgaccaagcttatcagcgagaaagccgacctgagtacgctcgccgccgcaaagatcaagcagttgacggcggactagaaaccgccaccgcaaacggtcgacgccgtttaacccagacgagaggatccgaaccgggttcgcccacttcaagaacgagaaattccagaagaacccggaattatatggcgaacttgccaaaggccagagtccaaagtt

SEQ ID NO: 22345 - DNA, 245 bp, Glycine max
  Clone ID: 701103668H1
gtacccaggccttcgtatgacaatgaaagaacaaaaaccttagtgatagttagttggctggtcatgtgtgttctgatttgcaatttatgcctgattagtgatccttcatatcacaaaatgtggcttctaattccacatattacccttgtccatagtacgaatggtcttttgttttttatgaggtcaatggcttgatcaagtcaagtagttttagacttaaagccataaagagaaataaaagagtt

SEQ ID NO: 22346 - DNA, 249 bp, Glycine max
  Clone ID: 701103669H1
gtggatattgtggcatctttccaaaccagctatttcatttcaggacttgctccctttggtgatgctttggttgttctagcatatattcctggagaagaagatggagataaggattttagtagcaccgctctttacggcagggcaatgcacaaagaccagaagtaagaatagtaacatggaataatgatgagctttctacagatgctcttccagtacatgggtttgagcattacagggcgaaggactatt

SEQ ID NO: 22347 - DNA, 248 bp, Glycine max
  Clone ID: 701103670H1
gtccccgaaacggttcgttttgcccttcttcggaaccctcccttccgcgccgctgctgctgctccggtcgccgtcgggattctccggtaaccgaacaccatcgatccgtcaggagcctcggatctcggactgagcgaaacgaatcgaaacgaaacgaaacgatgccgtctcatgcggatctggaccggcagatcgagcatctgatggagtgcaagcctctgccggaagccgatgtgaaggcgctgtgc

SEQ ID NO: 22348 - DNA, 254 bp, Glycine max
  Clone ID: 701103671H1
ctgcattctccttcttcagtaactttctccaatttgaaagaattgttcatattcaactcgtcaaagactgaagtatttattcacatcctcggcagcaaaaaagttaagtcaacttgaggagatcatcgtctatattgtaaatcaataaaagaaatagtggcaaaagaggaagatgaaacagctttaggagatgtcatattaccgcagctacaccgcatatctctagcagacttgtcaagcttggaatgttttta

SEQ ID NO: 22349 - DNA, 255 bp, Glycine max
  Clone ID: 701103672H1
atttaatcctatcctatcgtagcaaagaaagaaagaaagaaaaccctagcttaccttttcaactttcaagatgcaaatctttgttaagacactcactggtaagacaatcacccttgaggtggagagttcagataccatagataatgtaaagtccaagattcaagacaaggaagggatcccaccagaccagcaacgtctcatttttgctggcaagcagcttgaggatggacgtacacttgctgattacaacattca

SEQ ID NO: 22350 - DNA, 255 bp, Glycine max
  Clone ID: 701103673H1
ctcgagccgctgatattgttcgtttctcaactgtcattcatgagcgtggtagccctgaaaccttgagggaccctcgaggttttgccgtgaagttttacaccagagagggtaactttgaccttgttggaaacaacttcccgtcttctttgtacgtgacggcatgaaatttccagatatggttcatgctcttaaacccaatcccaagaaccacatccaagagaattggaggatccttgacttcttctctcacgttcc

SEQ ID NO: 22351 - DNA, 216 bp, Glycine max
  Clone ID: 701103674H1
gtttctgacaccgaaattgagccaaaaagttgaccctctttggatgaatgagaatatcatgttcctcacattaatacaacctggagattccaacaattgaaaactcctaaacacccttctcttccaaccccgttcatgcttccttccaatcctttggtgtgatttcaatcgtttcataagaaaacagcactcagttcttcttcttcttcttgttct

SEQ ID NO: 22352 - DNA, 253 bp, Glycine max
  Clone ID: 701103675H1
cctcgagccgaatcggctcgagcaacaaccctaacgcgtgcagagcatagagagacgcagccatggggcgaagacccgcgaggtgttataggcaaattaagaacaaaccataccccaagtcacggttttgccgtgtgttcctgatcccaagatcaggatttacgatgttggtatgaagaagaagggtgttgatgagtttcctttctgtgtccatctggttagttgggagaaggaaaacgtttctagtgaggcc

SEQ ID NO: 22353 - DNA, 256 bp, Glycine max
  Clone ID: 701103676H1
cttccccaaccattggaatacattccttaacccaccgcaaatccaaatccaaattcaattcgagctgaacctagggtttgttccttcctattgccttcacggatctcgcattctcctcaaatttccgaaacggaaaaagaaaatgcacgcgaaatcggcgcagtcgtcgttccgggatcggactcaggaattccacagcatcacagagaggttgaagaagtccggatcagggcccaatgggcccagcagcagcact

SEQ ID NO: 22354 - DNA, 256 bp, Glycine max
  Clone ID: 701103677H1
gagaagtgaggcctattctgccatagagaactacctcagctccaaggcatcaacacaagcgaagaggctcaaagctgacatagggaagaacaaccagtctcttgttctcagcatggatgaccatgaagaagtactgatgagttcaatggtgtaaagctttggtgggcctatgggaagcacatttccaagtcacaatccacaatttccttccaccaccctatgtcagatgagaaaaggtactataaactcacttttc

SEQ ID NO: 22355 - DNA, 190 bp, Glycine max
  Clone ID: 701103679H1
aattccaggctcaaaggaacctcaattatggaatgatgtctggaagttctttgagaaagcatctttcttgaatttgatgatagtaaaatgcagaagacttatgagacaatttcattcaaggcagtccatgatgacattgttgagctcaagggattgtgtgatctactcaaatctcctgtaatttttgctc

SEQ ID NO: 22356 - DNA, 255 bp, Glycine max
  unsure at all n locations
  Clone ID: 701103680H1
tggttccaagactaagctcgaaaacaattcgtcaggctgtgggtgttgtgggttgtgtcattatgcctcacaatgtattcctgcattctgctttggtgcaatcaaggaaggttgatcctaaaaagataggtcggtgcaggaggctctcaactactattcaatggaatcggcggcggcattgcagtctccttcatgatcaatctatntgtcacaacagtttatgctaagggttttatgcacaaaacaggcagatag

SEQ ID NO: 22357 - DNA, 262 bp, Glycine max
  Clone ID: 701103681H1
ccctcgagccgcttcagaccatggcgaacaagatcattcacgacaccactaggaagatgtcgcagctgtgccagaaaatcgttaaggtcgacgtccggtggggtgtcctcaaaagggtatctttcgttggacactttttccgcttcattggaacagacttcttgtttgctccgtcgccggaaggccatctcagtaccggaaactacccgtccgggacccctcttcttcgccgccgtcctacgctgacgacgtcttcttttcc

SEQ ID NO: 22358 - DNA, 252 bp, Glycine max
  Clone ID: 701103682H1
gagcgagagaacaagaacataagggaaccacagcggcggtaacagaagaacaagcagagaatgggtcgagtgagaacgaagacggtgaagaaatcctctcggcaggtgatagagcgtcactactcgcgcagaccctggacttccacacgaacaagaagcttctggaggaagtggcgataatcccgtcgaagagggtaaggaacaagatcgcggggttctcgacgcacctgatgaaccgcatccagaagggcc

SEQ ID NO: 22359 - DNA, 238 bp, Glycine max
  Clone ID: 701103683H1
agataaagaggcgcaagatgagtggtagggtttctgggaaggtgaagtggttcaatgatcagaaggggtttggattcataagccctgacgatggcagcgacgatctcttcgttcaccaatctcagataaatctgacggtttccgaagcctcgccgaaggagagtccgttgagttcgccattgaatctgaatctgacggacgcgcgaaggctgttgatgtcactggccccgacggcgcc

SEQ ID NO: 22360 - DNA, 244 bp, Glycine max
  Clone ID: 701103684H1
caaaatggcaacatcttggtcatgttatctacttgcattgcttctttttatgtcaactattgtatcagagagtagagtggcaaggaaggacttgggcctggaccttggtgggttgggggttggacttgactgggtttgggcctggggataggaggtggcagtggctctggagctggtgccggagcagggtctggttctggttctggttctggttctagttccagttctgcctcaagttcagctt

SEQ ID NO: 22361 - DNA, 245 bp, Glycine max
  Clone ID: 701103685H1
tttctattgtcgcactctcatgtgatcaatttgttgattttggtgatgttgctagtagatctgtgtaggtttctcaaatctttcctgagctatttggaatggaaaaaggttgatagtttttatagaacattttatgtagaagaaaaaaattcttggtatctactaatgttattactttgattttgttaaaaaaaaaatttacaaacataatttcaagacttcatgataatcaacatgagttactg

SEQ ID NO: 22362 - DNA, 245 bp, Glycine max
  Clone ID: 701103686H1
acgctgtaaaggctgctgctattggcaatgacttgggaaggagcagtcaaggagagcacatattttccggtatgaattcatcacacggagctacttttcagtcgcattcacttccagagcctaaattagccaatatcgtggagcattgtcctcaattggtccatcaacatcaaatggatcctcagtggaaactttgtctgggccacagtttctatggggaagcccaactctctactcagagcata

SEQ ID NO: 22363 - DNA, 254 bp, Glycine max
  Clone ID: 701103688H1
accccatctacgctctaaactccgatccctaacttaacctaaccagacatcttcctcgcctctgccaggcacatcgtcctacgccacacaaacaccacacagatcgttccttcacatcttaccctactttgttattccccaatttcatcgaaccaataaattatatataaatatattttcatttttattttttgatgccgataaaaaatgccgccaaagcagcaatcaaaagctgatttagcgaagaagcagac

SEQ ID NO: 22364 - DNA, 215 bp, Glycine max
  Clone ID: 701103689H1
ctcattttctggctaaccaaccctgacactccttcttctccgcttactcttcgatcatcgcttcagaatgccgccgaagttcgacccctcccagatcgtcgacgtcttcgtacgcgtcaccggcggtgaggcggcgcggcgagttccctcctcccgaagatcggtaccctcggtctctcccgcaagaagatcggagaagatatcgccaaggaaac

SEQ ID NO: 22365 - DNA, 248 bp, Glycine max
  Clone ID: 701103690H1
attcgtgattgtttccgaaaacccttgtctctgaaatcaacaccaaaatcgtgaagtgtactaagcgaaccattgcaggcgtgagactggggaagaaagcaaaagggtcaaggaagggtaagaaggcatgagggctaacatcagcaccgtagagatcgaagatttcttcgagaaatcaacaaaggacgctctttctggtggctctctccaagccgtttctagcgattccctcttttatgaagacaagt

SEQ ID NO: 22366 - DNA, 262 bp, Glycine max
  Clone ID: 701103663H1
caacaatggcagataactcaattagcttattttctccatacaacaagatgggcaaattcaacctctctcatagggtggtattggctcccatgaccagatgcagagcgctcaatgggactccactggcagcacatgctaatactacgctcagagatcaacaccgggtggatttctcatcactgaaggcaccttgatctctccaacttcttctgggtttcctcatgttcctggaatatactcagatgaacaggtagaggcatgg

SEQ ID NO: 22367 - DNA, 205 bp, Glycine max
  Clone ID: 701103636H1
gagtgcatgtgtcataagtgtagatctctaactaacatattatgtctagtcgagtcttgcttttgattaactcctgcatagatgtttctacccaaaaatgaaaaaaaaaagaagcttttataggtttttggtttctcatccaggtcacttttgtttctggtcgtttttttaatttctcaatttcaaaaaaatacccttttaagtc

SEQ ID NO: 22368 - DNA, 254 bp, Glycine max
  Clone ID: 701103637H1
ttgtgtttttctgatcccttatcttaattaatttaatcaccaatggctcgttctatcgctaacgccaagactttctccgctctcgtgctagacggattctccaacactctcaccagacgtggctactctcaaagcgcaacaaggggaggagttgcctccatagcacccaaatcaggggaagacaaaggtgtctcatcatacaaggtttcctgggtgccagatcccgtcaccggttactacaaaccggaaaacat

SEQ ID NO: 22369 - DNA, 253 bp, Glycine max
  Clone ID: 701103638H1
cttctcataagctctacttagcaaatcaaaatggcactttcttcttcatcttcaacatccatatttgctttagctttgttcactactcttttgcttataggaagttcttcagctcaactctctgagaacttctagatagtaaatgtcccaaggttttctatgccgtaaaatccgttcttcaatctgctttggctaaagaacctcgccagggagcatctatcgttcgcctcttctttcatgactgctttgtcaa

SEQ ID NO: 22370 - DNA, 254 bp, Glycine max
  Clone ID: 701103639H1
gttatgacaaggctcattttgattatggtttggaggaagctgattaggaaccccaacacatattccagcctctttggtctcacttggtctttgatctcattcaaatggaatgttgttatgccagcaattgttgctaatcgatatcaattttatctgatgctggtctagggatggcaatgtttagccttgggttattcatggcattgcagccaaagattattgcgtgtggaaactcggttgcttcctttgctatg

SEQ ID NO: 22371 - DNA, 261 bp, Glycine max
  Clone ID: 701103640H1
tgatgatcctgagtctgtgcagcgatctgttggaggcctcacagaacataggacaaagactagaaaaacttgcagaggcacttggtttgccattcgagtttcgagcagtggcatcaaggacttccattgtcaccccatcaatgctcgactgtagtcctgatgaagcacttgtggtgaactttgcattccagcttcatcacatgcccgacgagagtgtttcaacagcaaacgaacgggaccaacttcttcgcttggtgaaga

SEQ ID NO: 22372 - DNA, 253 bp, Glycine max
  Clone ID: 701103642H1
gttgtgatcaactacgttacttctctcttggttttcttcatcttccaccttcacctggtttacttccttcgataattaactttatcaaaatcaaactttgatgttcttgcttgtcttaattacttctctgtcgtttgagaatagtattacactattgtctgggaattttgttcctttcctcttttctgaattccgtttctctgaaaagaagtttatcataaacacgttggaatggcaaggaactacttcaaac

SEQ ID NO: 22373 - DNA, 260 bp, Glycine max
  Clone ID: 701103644H1
cgaaatcagaggacctaggttaaggttgcggtgctggtggtcgagttcacaggaagaggaagagataaaatttgaaagaggaagttgaattgaaggtataatggcgaggcgagagctttcaagcacgttgaagaacgaaagttcatgcaaagggcagctctgagggaggagagaaccaagaaagaagaagaggttaagcctgatgtcagtgttggcacatccactgcggttactagaaagtgtgtggttataatggaagg

SEQ ID NO: 22374 - DNA, 262 bp, Glycine max
  Clone ID: 701103645H1
ctaacgggtcccaatccgatgatcattccttcaattacatgaaattctgccgacccactttctctgatcgcgttccctgcatacccatttgcaagaatcgtgacactgccttcacacgcgtggaggagtttgacacatgtgtggaggataatgatgatattgaggttgaggttgtggagggtgttgatctttggttgaagattcaagaggaggcaaggttacatgttgatcaagaaccaattttatccagctactatttcag

SEQ ID NO: 22375 - DNA, 261 bp, Glycine max
  Clone ID: 701103646H1
gccatctccattccctttccctttaaacccattccctttcaacatcacaatgagttccacatacaaacatccatcatcattattattttactccgaacgagttgacaccgattccactcactcaaccatgcgccgatcaggcgttttgagctcatagaacaaccacctttcttccactcctgctactctttcccttccttcgtcctccaagactcactctctctcgacctcgacctcttgccacttcccagccacttcgac

SEQ ID NO: 22376 - DNA, 262 bp, Glycine max
  Clone ID: 701103647H1
atctccttcagatatgcgagagccaaagctggctgctaaaatagctaagcaacttcaaagatttcatcatggcgaaattccaggctcaaaggaacctcaattatggaatgatgtctggaagttctttgagaaagcatctgtcttgaatttgatgatagtaaaatgcagaagacttatgagacaatttcattcaaggaagtccacgatgaaattgttgagctcaagggattgtgtgatctactcaaatctcctgtaatttttg

SEQ ID NO: 22377 - DNA, 127 bp, Glycine max
  Clone ID: 701103648H1
ttaattggctgaatatgatgtcgacctcgacgaacgtggtagtcctggacaacggccgcaggctgatcaatgcggcatcggcggtctgagcgacccctccgtcatagtcccgaagtgactctaacgc

SEQ ID NO: 22378 - DNA, 258 bp, Glycine max
  Clone ID: 701103649H1
ttgacagcaaggagctccggtatgaccaagaaagtggatttcatgtcttggatgctttgccgaagaatgtggatgtggggacatatgtgtttgtttttgagattgtgcttcatgattttagcagtgaaaaagttttgcaactggaggccaaattcatgtaccaatatatgtcactggaattattgaagttggtaatgcagaaatcacagttcttgacagtgatcttggaagtgctgaaacccagaaaaagctagattt

SEQ ID NO: 22379 - DNA, 253 bp, Glycine max
  Clone ID: 701103650H1
aaagaaagaaagaaagaaaaccctagcttaccttttcaactttcaagatgcaaatctttgttaagacactcactggtaagacaatcacccttgaggtggagagttcagataccatagataatgtaaagtccaagatcaagacaaggaagggatcccaccagaccagcaacgtctcatttttgctggcaagcagcttgaggatggacgtacacttgctgattacaacattcaaaaggagtccactctacacttg

SEQ ID NO: 22380 - DNA, 247 bp, Glycine max
  Clone ID: 701103651H1
ttgctaactacttagactgaaggaaagagaagcatgagggtgttttctcggttcaaatttctgtcaagagcagtgcacgaggaacaagagggtgagcatgatggggagagaaacaggtaccctttaacagaacaagtttgtgcacgtccctaacgctaacagtttggagaaaatcccttgtgattagttgtaaaggattcactgtgatagattcatatggaaacttgtgtatcgggtggacattaca

SEQ ID NO: 22381 - DNA, 252 bp, Glycine max
  Clone ID: 701103652H1
cgtagaatcgaatcgagttcactttgatcgtgtgtgtctccgatcttcaaatccgcaacaaccatggtgaggggattgctcaacaagctcgtctctcgctccctctccgtcgccggaaaatggcagcacaacaactccgccgcctcaacatccacgagtaccagggcgctgaattgatgagcaaacacggagttaatgttccgagaggcgtggctgtttcctctgttgaagaggtcagacaggccatcaagg

SEQ ID NO: 22382 - DNA, 252 bp, Glycine max
  Clone ID: 701103653H1
ggcttctcctcttcttactccttacaagatgggcaaattcaatctgtcccatagagttgttttggcaccgctgaccagacagacgtcttacgacaacgtcccacaaccccatgccatcctctactactcccaagaacttccaacggaggccttctcattactgaagccactggcgtctctgacacggctcaaggctatccgcaaacccctggcatatggactaaagaccatgttcaagcttggaaacccatt

SEQ ID NO: 22383 - DNA, 249 bp, Glycine max
  Clone ID: 701103654H1
gtttctgtttttaagagcactgatttgtggtgtttttatttttattttatttttctgttatgctttagttctataaggagcactaacatgcttataattagtgtacttgctgttataaattccagtcttctattttctgccttttcatattttctcagtttgctttagctttgtctttctgtatatcaatacacactataaccatgcttctaaggctggaagaaggcgggactatgtcattagagaatg

SEQ ID NO: 22384 - DNA, 253 bp, Glycine max
  Clone ID: 701103655H1
ctttctctctcttcttgcttctctctcttcttgctcctctctccctttcaattactctctctaccaaggagtgatggctgtgcaactgtgggaaaccctgaaggaggccatcgtggcctacaccggcttctctcttccaccttcttcacggtgctggcgcttctttttgccgcttactacgtcgtcacgggtctttttggttcctccgacgaccaccaccaccgccaccgccacgcccaggaggaggagatgc

SEQ ID NO: 22385 - DNA, 255 bp, Glycine max
  Clone ID: 701103656H1
cttttcaatactctgtatgattttcttatttcaatatgatcctttgggtggtattgatcacaaaatgatattagtgttgttgctatatgttcccctgcaagagctgccactgtttatattagttttaatctgtacatgatgctgcttgccgagttattgcaagactataaaaggtacgagatgaagctaggtccttacttgcacaagcagagaggcagttccctgtttctgcaccaaatgccataacagctaatg

SEQ ID NO: 22386 - DNA, 253 bp, Glycine max
  Clone ID: 701103657H1
cacaagcctggaaaccgcccacaaactcgccatatgggtgttggacgtcgcatgaagattcaggggctccctgagccgctttcagaagagcactttgccaatctcaagcggtaaaagggcctgcccgtcgacgaactccgtccgaggtgcgctctagcaagaagcgtcgcacgtctgcgaagccgagaatcccgccagaaagctccgtgaggactcgggcaagactgctgtcgcatcgaagtcagcggggaaa

SEQ ID NO: 22387 - DNA, 255 bp, Glycine max
  Clone ID: 701103658H1
acatacattgtcaacacttcccacccatccagagagtgttcctattaatgcacttgttgctgtaaagggaacccctcttgaggatcagaagcctgttgaaatatgggagatgattcgcatgatagcaactgcactatcgtaatgccaaaagcaatggtcaggttatcagctggcagagttcgattctccatgcctgagcaggcattgtgctttcttgctggtgcaaattctatattcactggtgaaaagcttctc

SEQ ID NO: 22388 - DNA, 201 bp, Glycine max
  Clone ID: 701103659H1
acttgacatatctgctatcaccttttccgtttcttgcgattcgacgatggccgatcaaaagctttcagaaccggcgcttaaacgtgagcagcttgatgaattcgtgagtagtctatattttgaacaacgaattctgaactccgacttcttcaagacctcgagaacaatgatgaatgtaggaaaaatgggagcctgaaaagg

SEQ ID NO: 22389 - DNA, 255 bp, Glycine max
  Clone ID: 701103660H1
cggctcgagtcttctcttgcggctagggttttagcgcacttcttctagatttaaggaagatggctaaggaaaaggttcacatcagtattgtggtcattggccatgtcgactctgggaaatccactaccactggcacctgatttacaagcttggaggcattgacaagcgtgttattgagaggtttgagaaggaagctgctgagatgaacaagaggtctttcaagtatgcctgggtgctggacaaacttaaggctga

SEQ ID NO: 22390 - DNA, 260 bp, Glycine max
  Clone ID: 701103661H1
cgagatcaaccctgacccctaaggccaggggtttttctcggcttcttcagattcctgaaatggcgtctgtttcagctttagccaagtacaagctcgtcactcttgggtgaccaatccgtgggcaaaaccagcatcacactcgcttcatgtacgataaattcgataacacctatcaggctacaattggtattgattttctatcaaaaactatgtatctcgaagatcgaactgttcgactgcagttgtgggatacagctggc

SEQ ID NO: 22391 - DNA, 251 bp, Glycine max
  Clone ID: 701103635H1
cgaatatcttgttgtttggagcgatccgagaaaaactctgtaaacatgttggtttaccaggacctccttacaggtgatgagcttctctctgactccttccgttacaaggaaattgagaatggaatgctgtgggaattgaggggaagtgggatgttaaaggagcagttgatgtagacattggtgcaaacccttctgctgagggtggaggagaagatgagggagttgatgatgcagctgttaaggttgttgac

SEQ ID NO: 22392 - DNA, 259 bp, Glycine max
  Clone ID: 701103606H1
ctcgagccgctcgagccgattcggctcgagggtcctttgggaagtttcaattggtttgacactcatgatcattcaatgagccgaacaaactcatacattagcggggataataagggtgcagctgcacgatttatggaagctggtttgagcgaaaagggtctgtaagaatggattcggttggatttgaaaatgatggaatcccccgaagaatttcaaacataattcccagccttcatgataatcaccatgaattactgga

SEQ ID NO: 22393 - DNA, 258 bp, Glycine max
  Clone ID: 701103607H1
ctgcaatctaaggtagaaataacaaacacaacatgggttctttgggcacaatcaacaagccacatgctgtgtgcataccgtacccagcacaaggccacataaacccaatgctaaaactagcaaaactccttcacttcaaagctttcacataacctttgtaaacactgagtataaccacaaacgccttctcaaagcaagaggccctgattcccttaatggactctctacatgtcgctttgagaccatacctgatggact

SEQ ID NO: 22394 - DNA, 156 bp, Glycine max
  Clone ID: 701103609H1
aactagaactatattagagtttagtttgaactgttcgtgatcaggtgacctgtcaatcaatcctcttgtttatgttggattttatagtaaaaacctgaatttggatattccttttttttccactctaattttcaaaatgaatcactttgtattgaa

SEQ ID NO: 22395 - DNA, 263 bp, Glycine max
  Clone ID: 701103610H1
atttcgtcaattccaacaacaccacaatgggaagaagaccggcgaggtgttaccggcagataaagaacaaaccgtacccgaaatcccgtttctgccgcggcgtgccggagccgaagatccgaatctacgacgtgggaatgaaaagaaaggcgtggacgagttcccgttctgcgtgcacctggtctcgtgggagaaggagaacgtctccagcgaggctttggaggcggcgcgcatcgcatgcaacaagtacatggccaagttcg

SEQ ID NO: 22396 - DNA, 267 bp, Glycine max
  Clone ID: 701103611H1
attccattctctctgtgtatttccctacctctcccttcaagatgcagatcttcgtcaagaccctcaccggcaagaccatcacccttgaggtggaaagctctgacaccatcgacaacgtcaaggccaagatccaggacaaggaggaatccccccggaccagcaacgtctcattttcgccggaaagcaacttgaggacggccgtacccttgctgactacaacattcagaaggagagtactcttcacctcgtcctccgtctccgtggtgg

SEQ ID NO: 22397 - DNA, 265 bp, Glycine max
  Clone ID: 701103612H1
atctgcttcaatggggaagggaacagggagcttcgctaagaggaggaacaagacccacactctctgtgtgaggtgtggccgccgcagcttccacctccagaagagtcgctgcgccgcttgtgctttccccgctgcacgcacgcggaaatataactggagcgtcaaggcaattcgcagaaagaccaccggaactggcaggatgagatacttgcgtaacgtgcctcgccgtttcaagagtggcttcagagaaggtaccgaagctgca

SEQ ID NO: 22398 - DNA, 267 bp, Glycine max
  Clone ID: 701103613H1
ctcgagccgcaagtctcctcctcctcctgttcattcaccacctacaccacactacatctatgcatcccctcctcctccatatcactactagatagtggttttgcttagcttcccgagtagttattaatgaagaatataagccataaagaacgttgttgatagcaggaagatgcacttcgcaattacacaaggaaaacaacggaagcaaagtttccgcgcattttgtcacataagaagaaagaagtgtccatccttttcttcttcgtt

SEQ ID NO: 22399 - DNA, 268 bp, Glycine max
  Clone ID: 701103614H1
cacgtctttctctctccaccatgcaccaagccattccctaccgaacctccatcctgaccggcacatgtgacatggcacacgccggaggaatcaaagaattcaacctcgccaatccatccaacgttgccgcaatggtttcggaagcgcagtggtaatcattgggaaacgggggtgctgcatgtgccacgtggtcaaaaggttgttgcaaggtctgggagtgaaccctcccgtgtacgaggtcgacgaggaccacgaagccgccgttgct

SEQ ID NO: 22400 - DNA, 200 bp, Glycine max
  Clone ID: 701103617H1
gcgctgattgtgagtggaaggcccaagcagggaacatttgtgttgcatcatttgattggagctgcagtggaatttgcaggtctgctgagaggattaaagaggtacataggaggtgtcgagagggtgagaatgcttgtggagtgccgctttctagggggcaaaaaagtgagagcggagttcgtcctaactcaggacgatta

SEQ ID NO: 22401 - DNA, 228 bp, Glycine max
  Clone ID: 701103619H1
gccaaagagaagagtgcgaaacaagaagaagaaaatttctcatttctcgttctgaaaatcggagttcaacgctattattatatttgtggtatcttctatctgattcagcatcatggttcagctaatgaggtctgataggataatcactgtctgacaaacgtgaagttggaggttcaagatgaaatcccccctcttcacactcacaagcgacccaaattggaatctccc

SEQ ID NO: 22402 - DNA, 248 bp, Glycine max
  Clone ID: 701103620H1
ggcggctgaggactgctacgccgtggaaaggatctggaagcttctcgcggaggtggaggacctccacctgatgatggatccggacgatttcttgagactgaagaatcagctctcggtgaaatcctccggcggcgaacggcttcgttctgcttcaggtcgaaggagttggttgaactgacgaagatgtgcagagatctgaggcacaaggtgccggagatattggaggtggaggtggatccgaaggagga

SEQ ID NO: 22403 - DNA, 257 bp, Glycine max
  Clone ID: 701103621H1
gagcagatgaaattaaagaagcagcaccgaaaccggatgaccagtaaaaatattttactgctaattagaattgaacttctcctccatatctttttgaagggagaaggtgtttgttgctaatatctctttggtactggattttaggcattcatgtctgttatgaattgtggatgtactgggccgttttagtttgtccttccattttctcaagtgttttccaaattgcctattttattaaggacactgaagtttttatt

SEQ ID NO: 22404 - DNA, 254 bp, Glycine max
  Clone ID: 701103622H1
gattacttgagtgaagaagaactcaatcactctgaattatggtgcataaagctgactgcgtttatgatattatctgctactatgtctggcattgtttgaactttcactcgcagcggcttattcgtgtgatcttagttctctactctcattccaagcgtgggtgtatatcaaggtggcgtgatatgccatggtcgctagacctgttacagagctgatatctataccggcgacactaatggtgtcaaactcggaga

SEQ ID NO: 22405 - DNA, 260 bp, Glycine max
  Clone ID: 701103624H1
cctcgagccgattcggctcgaggattagagtagtagtttgtgttgacgattgacgacgacgataacgacaacgacgaagcatcatgtcttccggcggcggcggaggcggagcaaagccgttcttctgccacgtgtgcagtcaaggatcacgtgctccgatgagtcggaacccttctgcccgatctgtatggaaagtttcgtagaagaatgcaaccctaacaaccctaaccctaatcttttcaccgagaatgaggatcttc

SEQ ID NO: 22406 - DNA, 265 bp, Glycine max
  Clone ID: 701103625H1
gccatcctggtgggggctggttaccttgctttgggttacttcattggttctcagtatccccctcgtttcctcttctcacataaattatcgactaaacataaagaagatgcttcacttctcaatgacaacgacaataagaagaggaatactaagtccaaactcaaagaccccctggagattgaacaactcgctgaaatcctcgatgattttaagatgatactcgttgtcaggaatgatcttaaaatgggtaaagggaagattgctg

SEQ ID NO: 22407 - DNA, 90 bp, Glycine max
  Clone ID: 701103626H1
ctcactttctctatcttcaaccagccagaaaaaaaaaaaaaccccgcaaccaacccctatttctccgaatttgggttccttccgggaagg

SEQ ID NO: 22408 - DNA, 261 bp, Glycine max
  Clone ID: 701103627H1
gaaaaatggtgctagaacaagcagtatcatcatcaagcaccttgaggaacgttttcaccaatcccaaaaccctaatttcaaaaccccaattccaagtcgccgcttccccttcatggaaaccacagcagccgcgctgggaaggtggctggggataaacttgaagtgctccatgacaacaacaacaacgccatcatcataccctaagccctcggagattccgtggcagaaggaactctgcaactccgtcaacctcatcggcaa

SEQ ID NO: 22409 - DNA, 262 bp, Glycine max
  Clone ID: 701103628H1
gttttattaggattttctcttctttgttttcaattaggtttttttgttgctctccttcaaactccatctttccaaatcctctctttgcgattgtgttttgatctgcttcctactgcgatagtttctctactgttacatgccatggcggtttccgcaattggttttgaaggtttcgagaaaaggttggaaatatcctttttccagccgggactttttgctgaccctgaaggaaggggtctaagggctcttacaaaatcccagt

SEQ ID NO: 22410 - DNA, 265 bp, Glycine max
  Clone ID: 701103629H1
cttgaatattcattgtcaaaggttgtttttgtgagatagaaagaagagaggaagagcaagttaagcaatcaatcatatcaaggaagcaattatggaaggtttgatcccatatcttattcatgcaatcaagaagcaaaagctcatcaccacaactacaggagctactctcattctgaaagctcaaaccgcagctaccacatgctattggcgtctgaatccttcacaggatcttctcacagaagaacaaggtctgattttcagcccc

SEQ ID NO: 22411 - DNA, 265 bp, Glycine max
  Clone ID: 701103630H1
gatggatactatatccatggacaatgtgctattatcatgtttgatgttactgcccggctaacatacaaaaatgttcccacctggcaccgtgatctttgcagggtctgtgagaacatcccaattgttctttgcggtaacaagttgatgtcaagaacaggcaagttaaggcaaagcaggttacattccacaggaagaagaatttgcagtactatgagatttcagctaagagcaacgacaactttgaaaagccattcttatatttggc

SEQ ID NO: 22412 - DNA, 261 bp, Glycine max
  Clone ID: 701103631H1
gccccatatcacaaaccacattaaaaaaagactaccacgtattcttctctctccgtctctctctctctctctctctcttcacagtgccaatggcggatccaatcgcgaaggttctgatcgcgtttgcgctctctacgttccctcttgctgtgttcgcacgcttcctccgacgttcccttcatcgttgctcacaagaaggcctccctcaacagactcaagtccggcgccgaaagggtctccgtcaccatcgacatcttcaac

SEQ ID NO: 22413 - DNA, 267 bp, Glycine max
  Clone ID: 701103632H1
gaaggcaagatgtcgaagagaggacgcggtggttcggcggggaacaagttccggatgtcgctgggtctgccggtggcggcgacggtgaactgcgccgacaatacgggggcgaagaacctctacatcatatcggtgaaagggtcaaagggcgtttgaaccgtctcccctcggcttgcgttggcgacatggtgatggccaccgtgaagaaggggaaacccgatctgaggaagaaggttttgccagctgtcattgttcgccagcgcaacc

SEQ ID NO: 22414 - DNA, 257 bp, Glycine max
  Clone ID: 701103634H1
catcttttgtgttcttctttgtttctcacctttctgaggatttttccatcttagttcctggaggcaccaggaacctgaccaaataaataaaccttttttttcttctaatttttctgaagtttcattttttagtccaaggcaacttggatattatcagaatgtggcttgaagcctcttgctccagtaattcctagacctagaactggggctgctttgtccagcacctcaagggttgaatttttggacacaaacaaggt

SEQ ID NO: 22415 - DNA, 260 bp, Glycine max
  Clone ID: 701103605H1
cttttcgctctctcattcaaaccattcgatctcatcatcgccaacatctcctcaaactgtaagtatacctacaaatcactgtaaatctccattaccactctcttagttattaacttagaatcttccctttctagttctaattataatcattctttttttatatttccccccccccatatgggtatatatatgattgggatctatacatgttagatgagtcagagatacattaatagtccaaggtagtttcattttctggg

SEQ ID NO: 22416 - DNA, 237 bp, Glycine max
  Clone ID: 701103570H1
agaaagtgtgccttggttatccttgcctttcaaggacaaaatctgtgggaagctagctcggtacttcgagctttcaaccctccccactttggttattattggaccagatgggaaaactcttcattctaatgttgctgaggcaattgaggatcatggggttgctgcatacccattcacccctgaaaagtttgctgagcttgatgaaatactgaaggccaaagaggcagctcaaaccct

SEQ ID NO: 22417 - DNA, 239 bp, Glycine max
  Clone ID: 701103571H1
aaaaaattgccagattccggccacaaattttctcgtttctctctgtctcctatcatatcgtcttcactctagcgtgccccatccgttccgtgtcaatttaccaatttacccctatatttttccaatttacttttttcacccgaagatataagataattaccgtttcgtgtaattttatcttttaaaagaaaagaggaagtatagtagtgacgtggcatgcggatagagagccatgaata

SEQ ID NO: 22418 - DNA, 238 bp, Glycine max
  Clone ID: 701103572H1
ctgaatctgtgatatatcattcgagctttgaatgcttctccctccataacaacaacaacgctctcttaatctttcttttttcatttccaatgctgcaacaacttgcaaggttcatatgcagcactacgacagacccaattgaattcccacaaaagaattaaagaaaaaacggtcaagttagaatcttttgaacctttcgatcgcgtgggaaggaagagaggaagatgggtgcgtacag

SEQ ID NO: 22419 - DNA, 238 bp, Glycine max
  Clone ID: 701103573H1
caattttcatttttctctctcccttagtcaaagggattcatcgttcttcttcccaggttatttagaaaagcaaaatggtgaagatttgctgcattggtgctggatatgtggggggtcctactatggcagtcattgcacttaagtgcccatccattgaagtcgctgttgttgatatctctaaatcccgcattgcagcctggaacagcgaccagcttcctatctatgaacctggccttga

SEQ ID NO: 22420 - DNA, 237 bp, Glycine max
  Clone ID: 701103574H1
aggagatctgcaaatacctcttccaagagggagtttgctttgcgaagaaggacttcaatttggcgaacaccctgagattgacgtgccgaatctgcaggtgattaagctgatgcagagtttcaagtctcgcgagtatgtgagggagacttttgcttggatgcactattactggttcctcaccaacgatggaatcgagtttctcagaacttaccttaaccttccttccgaaattgtccc

SEQ ID NO: 22421 - DNA, 235 bp, Glycine max
  Clone ID: 701103575H1
tttgtgatgctgtagataagtaccgtgctgcaatgttggttgtgggtagtcatggttatggggctataaaaagggcggttttaggtagtgtcagtgactattgtgctcatcatgctcactgcactgtgatgatcgtgaagaagccaaaaatcaaacactgatctgtaatggctgcgtctatatagtacaacaataaacataatcctttcagccaaagaagagagaaagaaaataa

SEQ ID NO: 22422 - DNA, 239 bp, Glycine max
  Clone ID: 701103577H1
ccgctcgagcggctcgagcaaagagagaaaccacgacacaacacaaaacctccttagacttggtgtattttgtacttctgtctgtgttgttccttcacaaccacagagtcaaaaacaaaaacatctaaaacctctttctttctctgtgtttgtgtttttagtttttgtttttgtcctatgaaactcccaacaacgtttgcagacccggaatccttgtcttacctttacaccttgctcca

SEQ ID NO: 22423 - DNA, 239 bp, Glycine max
  Clone ID: 701103578H1
gatcactatttgaatgttccatttgatctatccaaggtagtttttgtggctacagcaaataggttgcaacccattcctccaccacttcgtgatagaatggaagtaattgagcttcctggatatacacctgaggaaaagctccaaattgccatgcggcatttgattccaagagttttagaccagcatggattgagttctgagtttcttcagattcctgaggcaatggtgaagcttgttat

SEQ ID NO: 22424 - DNA, 239 bp, Glycine max
  Clone ID: 701103579H1
gcataatgcaatggcaaaatatttgccattcgatataatacagaaataaatgttctttaaggatggtgaattggtgactatcgtccaagtaacaccatattcacttatccgcattggattcgaatagctttttttatccttttttttaggcctggcttattaaggtgtatgtagtatgtaccttggtccatctgagacacagtgcatgtaagaccatcactattgtgttaccccacaat

SEQ ID NO: 22425 - DNA, 242 bp, Glycine max
  Clone ID: 701103580H1
ttggaggagataacgtcattagccggcaagggaatatcccaaagccaaaacacctctgcttatgctcacactcataaccagcaagtgaatcatccttcctttgttcctaatatctcccctcaagcaccgtccagaccacttgtttgtgatctgccaattgctaggaaagcttcacttcatcggttcctttctaagagaaaagatagaattgctgccaaagcaccctatcaaataaacaatcc

SEQ ID NO: 22426 - DNA, 238 bp, Glycine max
  Clone ID: 701103583H1
ctcgagccgctctgatctcactcaccattcaccaacctgcttctctgttctcttctttccctccccaagaagaagaagaagaagatgccttcttcagaatcatcaacaggcttctccgaaaccatttgtgtgaccggcgctggtggcttcatcgcctcttggatggtcaaactcctcttggagaaaggctacactgtccgaggaaccctcagaaacccagatgatcccaagaacgggc

SEQ ID NO: 22427 - DNA, 239 bp, Glycine max
  Clone ID: 701103584H1
aaaaccaaatcccagccaacatgaccaaggtgtttagagattccttcgctcggtgggcccaggcctctggggttttgaatctcaccgagacaacctacgacaacgccgacatccaagtagggttctacaacttcacttacttaggaattgatatcgaggtgtatggtggcagccttatatttttgcaacccgattctaccaagaaaggggttatacttctcgacggtaccaataagttg

SEQ ID NO: 22428 - DNA, 237 bp, Glycine max
  Clone ID: 701103585H1
cttcttcgcaatctcagaacagaacacaacagagcccttcaactctctctgtcgttgatggcgtcacaagcgagcctccttcttcagaagcagctcaaagatctttgcaaaaaccccgtcgatggcttttctgccggtttggtcgacgaaaccaacatttttgaatggagtgtaactataattggacctcccgatactctttatgaggggggatttttcaatgccattatgagcttt

SEQ ID NO: 22429 - DNA, 236 bp, Glycine max
  Clone ID: 701103586H1
gaattgctcgtgcgcgtgcgtgcgtgatcgtttgattgtttggatcttgttctcgatcgacgacgatgtcggagatggcgagcccagatcccgagggactcgacggagtccggatgacgtggaacgtgtggccgcggacgaaggtggaatcaagcaagtgcgtgatccctctggcggcgacggtggctctgatccgtccccaccctgacatcccccgcctcccgtacgcccctctc

SEQ ID NO: 22430 - DNA, 234 bp, Glycine max
  Clone ID: 701103587H1
gaatccgccagcgtccatggggaaagtgggctgctgagattcgcgacccaagaaagggggttcgtgtttggcttggaactttcagcactgctgaagaagctgcaagagcttacgatgctgaagcaaggaggatccgtggcaagaaagccaaggtgaatttccctgatgagccttcaggcgctgcttcctcaaaacgtctcaaggcgaatccagaggctcagccaatgaagaaaa

SEQ ID NO: 22431 - DNA, 236 bp, Glycine max
  Clone ID: 701103589H1
gaaggaagtcttacctttctgtcagcaaagttcgatggaatactgggacttggatttcaggagatctcagttgaaaatgctgtgcccgtatggttcaaaatggtggagcaaaaacttatcagtgagaaggtgttctctttttggcttaatggggatccgaatgcgaaaaaaggtggtgaattagtttttggtggtgttgacccaaagcacttcaaaggaaaccacacttatgttcc

SEQ ID NO: 22432 - DNA, 237 bp, Glycine max
  Clone ID: 701103590H1
gcagattacatacgttatcgtaaaatcacttcaaatatgaacgatcggtttccagatgcaacccctgaagagcttaatgcaagtgatgcaacctgcattatttgtcgtgaagagatgacgacagccaagaaacttatatgtggacatctttttcatgttcattgtctccgatcatggctggagcggcagcacacttgccccacctgcagagccttggttgtaccacctgaaaatggg

SEQ ID NO: 22433 - DNA, 238 bp, Glycine max
  Clone ID: 701103591H1
aatttctcgatcataaattaattacaaaaataacataggttgtcgcaacatggagattcacgaaaaccaacacgagtcatggtcggaaacggagagcacgggaagccggagcaggagagtgggcttcagtgggcctctgagcggaccactgagcgggcctttgagtgggcctttggtttcttctaacaaaagaaacagcagcaagaacaaaagtgcgaggttcaaggacgacgaggag

SEQ ID NO: 22434 - DNA, 234 bp, Glycine max
  Clone ID: 701103592H1
tttctatttctaaaacagcgtttgcttttgtgtttggtcttagacgcagcacgcccccaccactgtttcaaccctcaaattgtgtcttcttcgctttctggttttgattaggttttgttccatttgaaacaatattcatcgatccatcgccaaacatgccttctagtcacttgcttcttgaggaacctattaggatggtctccatccttgaaccatccaagcctagttttttct

SEQ ID NO: 22435 - DNA, 232 bp, Glycine max
  Clone ID: 701103595H1
ctcgagccgctcgagccgattcggctcgagcacagacacggaaagggaaagagaaaacacaaccagaaacacaacattacttctttgaacttgatgtgtcttgtagcaaatgtccttccgcagtattgttcgtgatgttagggacggatttggaagcttatcaaggcggagttttgatgtaaggctttctggtgggggcaagttgaatagtttggtccatgatgtgcacgaa

SEQ ID NO: 22436 - DNA, 241 bp, Glycine max
  Clone ID: 701103596H1
gtttcttggttggaaaggggcatcagggttctcagcctcttccacagccgaacaagtcactcaagggattgatggaaccgccctcaccgccatcgtcacaggagcaacaagtggccttggtctggagaccacccgggttcttgcattgcgcggtgtccatgttgttatggcagtaaggagtctggacagtggtaagaatgtcaaagaaacaatacttaaggaaatcccctcggctaaaatt

SEQ ID NO: 22437 - DNA, 269 bp, Glycine max
  Clone ID: 701103601H1
atttgaagattaaagaataatgggttgttacagagttcagcttgtggcaataatctcgttcatgcttttgctttcaaatacccacggttggggagatgatgggcatgccattgtttgtaagatagctcaggctcgcctcagcacgcagctgcaaaggctgtgaagaaattgttgcccaaatctgccaataatgacttggcgagcaagtgctcttgggcagatagtctgagggttgtcttcccttggtcttctgctttgcactttgctaa

SEQ ID NO: 22438 - DNA, 267 bp, Glycine max
  Clone ID: 701103602H1
actgcattccgcttcagctcgtcgggctcgagggcaagaaggcctacattgttgtctctggaggcaattactgcccttgtgaagatgctgcaagagctctcaaatggcctgcattggtctgcaaagaacgccggtttaagattttgacttggccattgaagcactttctggggtgtcagattctgaggcaccagtgatacatgcagtgtacaccagcttgaagggtttgatcaaaattcacaatcccagtgtagtgatcagtctggc

SEQ ID NO: 22439 - DNA, 255 bp, Glycine max
  Clone ID: 701103603H1
ttcgacgatcgcagatcgtatatgaacaggcattcttgagattaattgcttgagtctgagataagtccaggtactgcatttctttgggttaattatacaagatatttttagttctgggtacctgttcctacaaagactatacttataaatatcttcaaaaactgggaattgaagtaaagatggtggccacgtcatgcttgaatttgttggatttggtatcaggggatatgctaaatttccctcagacccccagat

SEQ ID NO: 22440 - DNA, 217 bp, Glycine max
  Clone ID: 701103604H1
aactactactactactgcacacactctctctctctctctcattgtatggccgccaattcgagtagccgagggatcaccgccttggggaagcgagtcgccaaccagatctggacttccaaccccccctcagctcctctcattccaggaggggagcaatagcagctgcatacagtagcagcggcgggtcagtgtatgacaagaaccctgatgatcagat

SEQ ID NO: 22441 - DNA, 238 bp, Glycine max
  Clone ID: 701103569H1
ggaacattgacttggtgtatggtgggggaagtgttgggctgatgggcctaatatcccagagaatgtatgatggaggctgccatgttctaggggttattccaaaagctctcatgcctcttgagatatctggtgaaccagttggtgaagtaagaattgtttcagatatgcatgagcgtaaagctgcaatggctcaagaagctgatgcatttatcgccctccctggaggatatggaactat

SEQ ID NO: 22442 - DNA, 227 bp, Glycine max
  Clone ID: 701103535H1
ttacaatggtcacagatgtcacatgtgtttgagatctgattcgctttacaaagtgatggagcggttggctaatcctggggttaggagacttgtggctgtggaggctggcagcaacgtgtggagggatattctttaagcgatgtgtcagattcttgtaggctgttgggataatttccggcttatatgaaggaatagctgtggttgcattggaaggactcgtttgtcta

SEQ ID NO: 22443 - DNA, 77 bp, Glycine max
  Clone ID: 701103536H1
ccctcgtgttctgggcgaagaccatcataatgtctgagatgacgatcataaggtgtgtcatactccattattagtag

SEQ ID NO: 22444 - DNA, 239 bp, Glycine max
  Clone ID: 701103537H1
aatttctctatttttcctccgtttctattgcaatttctcaattactacatcgtattctgcgaattcaaactgggtcttggttttctgaaagatgggaggtggcaaggacaagcaccatgatgaatctgacaaaggaattttttcacagcttgctcatggggtagctggtgcagcacatggtggacatgggtacccacctggggcttacccaccaccacctggggcatgacctccgcacc

SEQ ID NO: 22445 - DNA, 239 bp, Glycine max
  Clone ID: 701103539H1
ataaaacccatttttccctcgccctcgacgaatcaaatgcgtaccaacatagcattacccatggtgctaaccgggttactactctattctcgctccgtaatctccatgctcttcctcggtcgcgtcggtgagctcgccttagctggtggctctctcgccattggattcgccaacatcacgggctattctattctctcgggcctcgccatgggcatggagcccatttgcggccaggcttt

SEQ ID NO: 22446 - DNA, 242 bp, Glycine max
  Clone ID: 701103540H1
ttttggctctagctgctagagattccactgttcttaccggtggaccaagctggggagtacccttgggcagaagggactctcttggtacgagtattagtggctccaataacaacattcctgctcccaacaacacatttcagaccatcttaactaagttcaagcttaaggggcttgacattgttgatctagttgctctatctgggagccacactataggaaattcccgatgcaccagcttcagg

SEQ ID NO: 22447 - DNA, 239 bp, Glycine max
  Clone ID: 701103541H1
cttaaacctggagagaaccctaggcctcggcctaaagatcgccaactgattcaagatcgtgtaaaagagttgcgggaaattgtgccaaatggagcaaaatgtagcatagatgcacttctggaaaagaccatcaagcatatgcttttcctgcaaagtgtaacaaagcatgctgacaagctgaaacagacaggggagtctaagatagttagtaaagaaggtggattgctattaaaagataa

SEQ ID NO: 22448 - DNA, 242 bp, Glycine max
  Clone ID: 701103542H1
ccccgagcgaatcggctcgagctttcataaaaaaacaatctccaacaccaaacacaccacacggaaatcagccaaatcccgacttttcacccaagaggactactctcacttctacaacctctacgaagacacagactctaacaacagtctcaacaataacaacagcaacaacaagagaaagcgtaacaacagaaaagaagaaggtagtggtggaggtgcagaacaaaaagggcataatggta

SEQ ID NO: 22449 - DNA, 240 bp, Glycine max
  Clone ID: 701103545H1
atccaaattctcgagtctcaaatcagtgaaaagttggaagaagtgaagaagaaggacaaaattatagcagacaaagaaaattccattgaagataaatcaattaccatacaatccttgcagaatgagattgcttctctccagaaaaaagggtcactggatgctgaggagcaggttggaaaggctcatgcacgtgctggtgaactacagaagcaggtggacaaacttaaaagggaactagaa

SEQ ID NO: 22450 - DNA, 240 bp, Glycine max
  Clone ID: 701103547H1
atagtcccatgcaacttggtgatattagggccaatcactgtggtgctgaaggaatggtcctcaagtcgtcacttcctgtgaaggatactggttcaacttcaactgctggcgtgtgttattgatctataaagattggaaagaaatccattcaggttctatttgaacatattgatgaactggaattgtaataaaattgattaatataaataagatccttatgagctatgtataacttgaaca

SEQ ID NO: 22451 - DNA, 230 bp, Glycine max
  Clone ID: 701103548H1
tgagattttagcaagtcaacagtcgtcgactacgtctgtggactaatcaaaaccaatgcggactgaagaactgtcgcctgaacgtacgtatcttgaaacgctaattcgatatcctcatcgtcagctgagaaagagttcgatactactgcttttgaaagttctcaatcgcatagtgggtcctattatggtgccgataattccaattataatagtaatcagccgccgttccg

SEQ ID NO: 22452 - DNA, 240 bp, Glycine max
  Clone ID: 701103550H1
tgatctatcagaagtcactggaaaagagcaaatggatgctcagccaaccaagaaaggaagaggaaggaagcaataacttggccttttgctagacaagatggttttatgaatcacaggaccaactaaggttgagtagttacattttcccgacctaatgattacttcgtcagattcttatgatgagaggtttatatattgaagttttgaagtctcaatttctgatctctggcagtcttgagt

SEQ ID NO: 22453 - DNA, 239 bp, Glycine max
  Clone ID: 701103551H1
aatttttgtacacacacacagattcccctctttcgaatttcgatactttgatcagatccacaacacttcttcatccatgacgcttggttcttcaggatccagtgtcgtggttccaaggaacttcagattgctggaggagcttgataagggagaaaaaggaataggagatggcacagttagttatggaatggatgatggtgatgacatttacatgcgctcttggactggaaccattattg

SEQ ID NO: 22454 - DNA, 240 bp, Glycine max
  Clone ID: 701103552H1
ggggagtttgaagatgacgatgaagaagaagactatggtgctgggtatcttgttcagccagttggacagtctgatgctctcaatgctggaggagctgatgtggatggtggaaatgatgacgatggtgaagaggaggatgaagttgatgacgacgacgatgatcaggtgttgcctcctcctgactcttcccacaagaggaagagggatgatgaagaggacgtggacgacgatgacgatgtg

SEQ ID NO: 22455 - DNA, 240 bp, Glycine max
  Clone ID: 701103553H1
aaggaaggcactggagacactgccgagtgccgtaaaatgcagattttcgtccgcacggatcggactcacctcattgaggtgagtccggcccagaccgtcgccgatgtgaaggccgccgtcgaggcgctgcagggcctggaggctggcgagcagcgcattctgttcaacggtgtccagctggaggatggccaggtcctggctgcggctggcgtgagcgacgatagcacgctcatgtgcctg

SEQ ID NO: 22456 - DNA, 240 bp, Glycine max
  Clone ID: 701103554H1
ctattagctatagctagaagtccctccaatccctctttgtctttgtcgttttctagttccttccaaaataccaaccaaagcaaagacaatgagttgccaagcatggcccgaacccatagttcgagtccaatccttagctgaaagtggcctaagttcaatcccttcacgctacattaggccccactcccaaagaccctccaataccacttcttttccaactcctaaaccttttcaaactga

SEQ ID NO: 22457 - DNA, 238 bp, Glycine max
  Clone ID: 701103556H1
gctcttgggaagccttggtggcctcttctccaaaacttggaaaccaaagaagacacgtgcaataaccggccctgttattgttggagatgatccagtcaggagaaagggtaatcacttggagcaaagagagaagttgtcgctgacttctgcacccaaagggcagtccaagctacggtccccacctcaagaaccaacaaatgcatttgaaaaagttgaggttgagaaaaataagcaagat

SEQ ID NO: 22458 - DNA, 239 bp, Glycine max
  Clone ID: 701103557H1
gcaacggtgaaggtgaagaagaacgacctgttcaagctctgatggttcttaaatatgggggcgttcttacacatgctggcagaaagcaggctgaagaactaggaagatatttccgcaataatatgtatccagatgtctgcagctgcttttgccaaaggtcttcttgaccttgaagggcagctcacaccaatcctggtttcacttgttagtaaagactcctccatgttggatggtcttga

SEQ ID NO: 22459 - DNA, 236 bp, Glycine max
  Clone ID: 701103558H1
cggctcgagctcgagcgaatcggctcgagacctttttggatggcattccattgcactgagaagccagaactggcagaaatcatataaccttcttgaacgaacacagaaaagtaggaaaaaagaactgagactagttctttataaattgactgcagctatgagttccactaaaactgctatactcattaaatcgagcattatgacagttaacaatgaagctaggtctttataagttg

SEQ ID NO: 22460 - DNA, 240 bp, Glycine max
  Clone ID: 701103560H1
gtttttcgttcccttcacaaaactcagaaccctaactatatccatggcatcgggtggaacagaagcttttccagatttgggtaaacactgccagcaccgcgattgcaaccagctcgattttcttcctttcacctgcgacggttgccaacagatcttttgtttggaacacagatcctacaagtcccacgcgtgcctgaaatccgaccacaacagcagaaaggttgttgtttgcgaacatgt

SEQ ID NO: 22461 - DNA, 238 bp, Glycine max
  Clone ID: 701103561H1
tttgaattggttgtgaagatgtatccacaaggacggatgtctcatcactttagggagatacgtgaaggtgattacatggctgtgaagggaccaaagggacgttttaagtaccagcccaaccaagtaagagctttgggtatgattgctggtggcactggcatcaccccaatgtttcaagttacaagagctatattagaaaaccaacaggacaaaaccaacataaatttgatatatgcca

SEQ ID NO: 22462 - DNA, 116 bp, Glycine max
  Clone ID: 701103562H1
gcacaagcacaagcagcaatgttgtataactccatctcatcgtcattgtcattgtcactgtatgtagatcactcagccacttgagataatcttagatattcctgtacgtcatcgta

SEQ ID NO: 22463 - DNA, 241 bp, Glycine max
  Clone ID: 701103563H1
cgtgaagcatattgatgctcttactgacaggattggaaggaatgttgtccttgaacttgttagcactgagattgatccaaagaccaaatctgcaaagaaaagtaatgaagcagtgctgaaggattggtcaaagaagtccaatcttaaggcagagagagttaattacacggctgaattcataattgactctagttttggggagccaggagctattactgtgacaaacaaacaccagaaagag

SEQ ID NO: 22464 - DNA, 244 bp, Glycine max
  Clone ID: 701103564H1
gctcttgggaagccttggtggcctcttctccaaaacttggaaaccaaagaagacacgtgcaataaccggccctgttattgttggagatgatccagtcaggagaaagggtaatcacttggagcaaagagagaagttggggctgacttctgcacccaaagggcagtccaagctacggtccccacctcaagaaccaacaaatgcatttgaaaaagttgaggttgagaaaaataagcaagatgatgca

SEQ ID NO: 22465 - DNA, 243 bp, Glycine max
  Clone ID: 701103565H1
cggctcgaggataaactaagtttcctgaatagagcctgtgttatcaaagatcgggaacaagaaatagcctcggatggttcagcatcaaatccatggaaactctgcacagtagatcaagtagaggaactaaaagccattattaaagtgattcccttgtggtctacagggatcatgatgtcagttaacattggaggctcatttggattgctgcaagctaagtccctggacagacacatcacctca

SEQ ID NO: 22466 - DNA, 233 bp, Glycine max
  Clone ID: 701103566H1
gctcaaatgaatcaggggattttttctatcacgtcagcactcttaactttggagacccttttaggaagcatgagatgcactgcaggttcaagcagaagccaccatggccatgggtggcaataactacttctattggtatccttgttattgcactccttgttggatatattttccatgccactgtgaatcgaattgccaaagtagaagatgattaccgtgagatgatggaactt

SEQ ID NO: 22467 - DNA, 234 bp, Glycine max
  Clone ID: 701103567H1
gctgagaaatgactccccagtggtggccaagacatcaattgcaaaggcagtgggtgattggttttatgatcgaaggcccttccgtgagatagattgtgcctacccttgcaaccctacttgccataatcgtatttttgatcagaatgagcgtccagacgtatagattcatttaaaagagtatgcttatttatttattactacaaactatactttattagttatctggtttttatt

SEQ ID NO: 22468 - DNA, 239 bp, Glycine max
  Clone ID: 701103568H1
gtgaatgggaatgtcctcagtgtgatttctataactatgggaggaatatgacttgcttaaggtgtgattgcaagcgacctggacaaatatctctgggtgccaccaataccatgccaaatatggggtacgaaaatggaaacaatcctaatacttcagacattgatgctaggttagctgctaatgaagaaaaagcacaacgttggtttagcaaggtttctcaactagacagcagtgctgat

SEQ ID NO: 22469 - DNA, 243 bp, Glycine max
  Clone ID: 701103534H1
gtgatatggggtacctcaattcagttttgtcctcttcaagccaggttcatgctgcagaagattcacctgtcagtggagggggcctcagtcagaatggaaaattcagctatgggtatgctagctcccctggcaagagatcttcaatggaagatttttatgagacaaaaattgatggtgttgatggtgaaattgttggcctttttggagtttttgatggccatggtggtgctcgtgctgctgagt

SEQ ID NO: 22470 - DNA, 243 bp, Glycine max
  Clone ID: 701103503H1
cttcattttgttgataattctctgaacttgaggtcagcaccaccgatagataatgtggttcctcaaagccagccacttgtaattcatgttcctgctttgcctaggaatagacaatcatttagatggagtggtggttctagctccagaaacatccattcatcaaactcagttatatgcgcagacagggatcagcaggatgcaagctcaagaagaatgtctagaaatatgttagaacatccagtc

SEQ ID NO: 22471 - DNA, 244 bp, Glycine max
  Clone ID: 701103504H1
ctctgtttctactttgaggcctccgttgttggtgggtgggtctaccttctctcaaaatggccaccggagtgaacagaaaaatttctgctgcatcagctctggcccacaccagaagggcaaagaaaaccaattccctttccctcccatcgggaattcttggaacagcactagcagtgttgtttattgggtttttagcatgggcttatcaggttattcaacctcccgatcccaagataatgtggca

SEQ ID NO: 22472 - DNA, 244 bp, Glycine max
  Clone ID: 701103505H1
cctcgagccgaatcggctcgagaattcatacaggcttttaaattgccgttatttgcaaataactgtctcctaacagcaactgccttgaagcgtatttttgagaaagtggacgtgaatggcgacggattggtgagccttgaggaactgaatcgattgcttcagatgacgggcaattcccaatatagcatagaagagttggaatcacttgtggaaaagaaaagtcttggtttcagtgatttcttgt

SEQ ID NO: 22473 - DNA, 243 bp, Glycine max
  Clone ID: 701103506H1
aattaataacaagctagctattagttcgattttgtagtaagtgaggtgccaatatggtgaagatagctcttggtactttggatgactcttttagcgctgcctctcttaaggcttatttcgcagagttccacgcaactctgattttcgtgttcgctggtgttggatcagccatcgcttacaacgagcttacaaaagatgcagccttggatccaacggggctggtggcagtagctgtggcacatg

SEQ ID NO: 22474 - DNA, 244 bp, Glycine max
  Clone ID: 701103507H1
ctcaacacagaagcagaaggaggagaagcagaaagaggagacgaagcaatggcgccgaagaagccccgaaccacgtcgaggaaccctgatttggtcaggggaattggcaaatattcgaggtcgcagatgtaccacaagaggggcatctgggccatcaaggccaaaaacggcggtgttttgcccctccacgatcccaagcccaaacccgaggccccggcccagaagccgcccaagatctacccgg

SEQ ID NO: 22475 - DNA, 242 bp, Glycine max
  Clone ID: 701103510H1
catctgaggcaagttttcagccagtatggagaattagtgcatgtgaagattccagcaggcaagcgatgtgggtttgtccaattcgcagacaggagctgtgccgaagaggcacttcgggtgttgaatgggaccctgttgggtggtcaaaatgttcgtctttcatggggccgcagtccttcaaacaaacaggctcaggcagatccaaaccagtggaatggtggtgctggttctggtggtggata

SEQ ID NO: 22476 - DNA, 243 bp, Glycine max
  Clone ID: 701103511H1
ctcttcccatcttcctgacgatagtggcacttggtttccttgagccagtgctagatcagaacttgtacaacatggggatgaagatgacctcaacaacgtttgcatctgccactgttaatgtcctcccggccattacttttgtaatggcactcattttcaggctagagaaggtgaacttgagaaaatttcacagtgtagccaaagtcattggaacccttataacagtttcaggagctatggtta

SEQ ID NO: 22477 - DNA, 199 bp, Glycine max
  Clone ID: 701103512H1
ggagccagcgcgtgaccaggaaggcgattttgagttggtataggctatagtgtctgactgattgcatgtgctctgtctttttattctactctatgatccgggtgcctgagtggctggaacatttttattattccgcattagtataatggcttgtagtttgcattgtgacacgaaatgatataaactgcactttacgcac

SEQ ID NO: 22478 - DNA, 243 bp, Glycine max
  Clone ID: 701103513H1
ccttcttacacggagacattaaagttcttgcagaaattaaaagcatgccatgcctgaactcgtttgtttcagcggaagatatgtaaatacctctagaagagctagataggtgtttggattggcagttatatgtcaaaggcatgggaagtccatagatcatgtgagttcgacttgatacagcaactaaaaccttgtcttattaggtgaaatcaactacatggatagaagttttaaatttttaat

SEQ ID NO: 22479 - DNA, 242 bp, Glycine max
  Clone ID: 701103515H1
cttccattcacaaccttaaacctttctttcttgtaaactttatacattgattctgagaatagaactaagagggtatagacatggctagcgcaattgcagcttcttttttggttctgcttctggctttccccactgtatttggagctgaccatgaagttggtgacactagtggatgggccctcggagttaattacaacacctgggcctctgggaaaactttcacagttggtgacactttggtg

SEQ ID NO: 22480 - DNA, 243 bp, Glycine max
  Clone ID: 701103516H1
cgacacgacaccaaatattctcactcgtcgtcttcgtctgcgccctaaccaaattcaattcaaactcttctcatcaaaatccaaggctcgttcttgaaaccctaattcgatatcctcctcctcagaagaagaaggatcgatgtgggcagcttcttgcctggcgtcatgctgcgcggcctgcgcatgcgacgcctgcaggaccgtcgtatcgggaatcagccgccgttccgccaggatcgccta

SEQ ID NO: 22481 - DNA, 245 bp, Glycine max
  Clone ID: 701103518H1
atcaattcggcagataaaggtagtagtagtgttacgttcgaattcgaattgttccatttgcttcgcaaaagttgcaactacttccacagaaagaaaaaaagtttctaagttaaggaaatccagagtgaaaaaaaaaaaatggccggtgacggtgcagctacatgcatagacatccttcttgccattattctccctcctcttggtgtctttctcaaatatggttgccaggtggagttctggatttt

SEQ ID NO: 22482 - DNA, 221 bp, Glycine max
  Clone ID: 701103519H1
ttctagttttcctatcatccaatctctttagttagctcctgctccttttctgccagaagcttcaaggaaaaacaaagaaatgagacttggatttgcttcttggagattcatcctatgcaccctagttgtctttttgattctacaagacagtgtagctagaaagatagctacaacatctgggaatgaagttcaactgaaggaagtatcctatgatttgcaaa

SEQ ID NO: 22483 - DNA, 244 bp, Glycine max
  Clone ID: 701103520H1
ctcactcgttcattccaacctacccttattcttcttcttcaattccacacccatcatggaacgatttccgatcctctttctcctcgccaccctcatcaccctcgcctccggtgcccgccacgatattctccggttaccctccgaagcatccacttttttcaaagcacccggtggcgatcaaaacgatgagggcacgaggtgggccgttttaattgccggttccaatggctactggaattacagg

SEQ ID NO: 22484 - DNA, 241 bp, Glycine max
  Clone ID: 701103523H1
tatcaataagcggaggaaaagaaactaacaaggattcccttagtaacggcgagcgaaccgggaaaagcccaccatgaaaatcggtcgccctcggcgtccgaattgtagtctggagaagcgtcctcagtggcggaccgggcccaagtcccctggaagggggcgccagagagggtgagagccccgtcgtgcccggaccctgtcgcaccacgaggcgctgtcggcgagtcgggttgtatgggaa

SEQ ID NO: 22485 - DNA, 240 bp, Glycine max
  Clone ID: 701103524H1
ctcgagccgctcgagccggttcgattttgtagtaagtgaggtgccaatatggtgaagatagctcttggtactttggatgactcttctagcgctgcctctcttaaggcttatttcgcagagttccacgcaactctgattcccgtgttcgctggtgttggatcagccatcgcttacaacgagcttacaacagatgcagccttggatccaacggggctggtggcagtagctgtggcacatgca

SEQ ID NO: 22486 - DNA, 242 bp, Glycine max
  Clone ID: 701103525H1
aaaaagactcagttgtgtatcgttgcagctctactagctagggtttcgcaagtgcgatcgaagaagaacgatggcgatggctgctgctctgcgtcgcgaaggaaggcgtttgatccaaccaatcaacgccctccgttcctctctcatctctcaagaccaatcccctcatggcgcgcgcttcatttccactcaagtggtgagaaaccgaatgaagagtgtgaggaatatccagaagatcacca

SEQ ID NO: 22487 - DNA, 241 bp, Glycine max
  Clone ID: 701103526H1
gtcatagaattcacaaccgacaatggcgacaaaacctcgtttggcttatctctcttccacttttcttcttcttcttgttgtaactgtctttacttcggtgtcggcacaagccccagaatccccatcactctacaacaccttccttcaatgcctcaccaaatacacaaataacccctccaacatagtcttcgccaacaccaaccccaagttccccactatcctccaaaactacatccgaaac

SEQ ID NO: 22488 - DNA, 225 bp, Glycine max
  Clone ID: 701103527H1
ctctctatcgattctcgtaacaaaccctacccttttgagtcttccaagttttcaccatcgtaatgggttccgaaggatccagcgtcgtggttcctaggaatttcagattattggaagagcttgagagaggtgagaagggaattggggatggaactgttagctatggaatggatgatgctgatgacatatacatgcaatcttggactgggactatcatcggtcccc

SEQ ID NO: 22489 - DNA, 241 bp, Glycine max
  Clone ID: 701103528H1
agaatcccctcttctgttcttggatgggtttccttcatcaccctcttccctgaagccacataaccccatggcaatggcactcgacgcagcactctggatcgtgaagatgacatggattgctctcagtggctggatttcttcttgtttaactgtcgctgacgaattcgcctcttctctacgctctggcgatattggcccctttcatgtgggttgatccatttacgctctctatttcctccaa

SEQ ID NO: 22490 - DNA, 242 bp, Glycine max
  Clone ID: 701103529H1
attcgccgcagcccctgctccggcaacgccgagctcaccgtgccggagaacctggactccaccatgcagctcctcttcatggcctgccgcggcgacgtcaagggagttgaggatttgctcaacgaaggcatcgacgtcaacagcatcgacctcgacggccgcaccgccctccacgtcgccgcctgcgaaggccacgtcgaagtcgccaggctacttctcagccgcaagccaacctcgacgct

SEQ ID NO: 22491 - DNA, 242 bp, Glycine max
  Clone ID: 701103530H1
gttcgtgacatgaaggagaagcttgcttatgttgccttggattatgagcaagaacttgagactgcaaagagcagttcttcagttgagaaaaactacgagcttcctgatgggcaagttatcaccattggagctgagagattccgttgccctgaagttcttttccagccttctatgattggaatggaagctgctggaattcacgagaccacctacaactccatcatgaagtgtgatgtggatat

SEQ ID NO: 22492 - DNA, 245 bp, Glycine max
  Clone ID: 701103532H1
gcttgcttgacttgccaactttaagtttgtcaatttccgtgctgcttggtaggttgcaatcgcaagtgaacaattggctagcgcgtactagttttgaatcacaatggcagaggatgatggttacacgagagatggaacagtcgattactgtggaaatccagctaataacaaggaaactggaacctggaaagcctgcccctatatcttaggaaacgaatgttgtgagagattggcttattatggga

SEQ ID NO: 22493 - DNA, 244 bp, Glycine max
  Clone ID: 701103533H1
cactgcatatatgaatatacgaaattacgagagagagagagagagagagagagagagagagaagcgttaatctgaatgggttacatccaccatggaagaaccggtctcaggcacatactcagattcagaaccgccaccggcgtggtctcaaactccggcagatcgcaatcgcgcgctgcattcccctcccattcccctatcctcggcaacgtgctttttttctcaacaggcgataaatacctca

SEQ ID NO: 22494 - DNA, 244 bp, Glycine max
  Clone ID: 701103502H1
gtgcattccacacgctgcttccgattgaaggcatctaaggagagaaaaatgcacgatttctgcttcacgatcccctacggattgatgttagtgggtggtggactgttcgcctacataagcaaagggagcatcgcttctctcgccggaggcacggctccggtttgcttctcatcgtcgccggctatctcagtctcaatgctttcggcaaacgaaaaaactcttacctcgctctctttctcgagac

SEQ ID NO: 22495 - DNA, 227 bp, Glycine max
  Clone ID: 701103468H1
ctcgagccgctcgagccgagagaatccgaggcgaagagaagagaacaattaagatggaggggcaggagcaacatgtgtcgctgggagcgaacaagttcccggagagacagccgattgggacggcggcgcagagccaagacgacggcaaggactaccaggagccggcgccggcgccactggttgacccgacggagtttacgtcatggtccttttacggagcagggata

SEQ ID NO: 22496 - DNA, 251 bp, Glycine max
  Clone ID: 701103469H1
gtcttggaatattgtttagaggacatttctgatgtgtacccttataatgaaggcttggttatgagtaacaaagtgaaggacaagtataagaagggctcaactaatgaaggacatgctttatttgtataagtacattcttatagattaaaaccaattatgaggtcagaatttctttcagctataccattggcagctaggataattcttggcactaagtattttattaaagattactttggagatattcctca

SEQ ID NO: 22497 - DNA, 248 bp, Glycine max
  Clone ID: 701103470H1
gggctttgtgttaatctgtttttcacttttccgattatgatgaacccggtgaatgaggtgatggagagacggttcttcgggtccaggtactgcttgtggctgaggtggatgatggtcttgatcataagcttggtggcgcttttggttcccaattttgcggattttctgtcccttgtgggaagcagtgtttgtgttgttctgagttttgtgctgcctgcgatgtttcattgtttggtttttaaggagga

SEQ ID NO: 22498 - DNA, 248 bp, Glycine max
  Clone ID: 701103471H1
ctcgagccggtcccctgctctcgccgcggcgcttcctactacaatcgcagacccggggcccacgtcaacccttacagccgcggttgcagcgccattacgaggtgcagaagctgaattttttaatttaatttattttttttcggatgtgaattggaatgtgttttcttgttgttgttatataaatttgttactattattattcacgaacatttgtggtaatccatttcgggttgctgttgtttatttgg

SEQ ID NO: 22499 - DNA, 239 bp, Glycine max
  Clone ID: 701103472H1
agagcgacgaaataagtgtggcaaagcccacgcccgaggcgaataaaatgttttaatcgcgaataatgaaagcaaaataatagcagcagagagattattattgttaataataaaataaaatgataagatcagtgagacaattataaatgacatgttaaatatttaatgaagattaaaaaggaaagaaggaggtgggttccttacgcccaacgcatctttgttggttcggggtcggagct

SEQ ID NO: 22500 - DNA, 252 bp, Glycine max
  Clone ID: 701103473H1
gcccgttggtgccataatagcaaggtatttgaaggtgttcaaatctgcagaccctgcttggttttaccttcatgttacatgccaaacctctgcctacatagttggtgttgctgggtggggaactggtctcaaactcggaagtgactcggttggtattaagtataacacccatagagcactcgggatcaccctcttctgccttggaacccttcaggtttttgctctgctcttgaggcccaacaaagaccacaa

SEQ ID NO: 22501 - DNA, 257 bp, Glycine max
  Clone ID: 701103475H1
caggtatctgttccttcatcttccccaactctccatcacataccccatacctgttctccttcttttcccctttatccaccaaagccagggttttctctttcaattttcattttcatgcctctcagattcacgggattatgttttttctgtcgcacaaaccctttttcttcttcggtgtaaactcctattccttgttgcaatcgaaaagggtccctttgtctgttcttgtctactgttgttgatgtctattactgttg

SEQ ID NO: 22502 - DNA, 258 bp, Glycine max
  Clone ID: 701103478H1
ctcgagccgaatcggctcgaggacctgttgaatgctctaggttcactgtatactgctgttctcttccttggaatacaaaatgcttcctctgttcagccagtggtagcagttgaaaggactgtcttttatagagaaaaagctgcgggaatgtattctgccttaccctatgcatttgcacaggttctggtagagataccatatatcttcgctcaagctgtgacatacggtttaattgtttatgccatgatcggatttgac

SEQ ID NO: 22503 - DNA, 258 bp, Glycine max
  Clone ID: 701103479H1
atcatacccaacaacatcctccgacaccatgttgcacatggaaaaccccctcctgcagtcaacaaactcaattaccttcacattctttgggctgttgttatttctctttgttctttcatccatattcagaaaccgcggtgctgcaacaagataagcaccaccagatgctagatgcgcgtggcctttaattggtcacatccacctcttaggtggctcaaaaccaccccatgtcacgttgggccacatggcggacaaata

SEQ ID NO: 22504 - DNA, 263 bp, Glycine max
  Clone ID: 701103480H1
attttcctttgtttctatggcttctgcagaagtagagttccgatgctttgttggtgggcttgcgtgggccaccgaccacgatgctctcgagaaagccttctctcaatttggcgaaatcgtcgaatcgaaggtcatcaacgatcgtgaaactggaagatccagagggtttggatttgtgaccttcgccacagagcaggcgatgagagacgcaattgaaggaatgaacggccagaacctcgacggtcgtaatataaccgtgaacg

SEQ ID NO: 22505 - DNA, 249 bp, Glycine max
  Clone ID: 701103481H1
aagtgcgttttggaagcagagaccgaaatacttcgagatggcccgtacaaagcaaactgctcgtaagtcaactggaggaaaagctcccaggaagcagcttgcaaccaaggctgcacgtaagtctgcaccaacaactggtggtgtgaagaagcctcatcgttatcgccctggaactgttgctcttcgtgagattaggaaataccagaagagcactgagctcctaatcacgaagcttcctttccagaggtt

SEQ ID NO: 22506 - DNA, 250 bp, Glycine max
  Clone ID: 701103482H1
caggacttaaaaatatctctgatccaccacctggtggcactagaagaagaacgacaattcccacgggcatttatgctccccctaaccgtgatcacattgctctggcgttggcaatggcttaccaagaggtcaccaatcaccataaacagcgccctcctatcaacgatctcgggccaaatgataagcttcctagctgattcacttactgctacttaccctctcagggtttcgaggcctgggtccttaagca

SEQ ID NO: 22507 - DNA, 250 bp, Glycine max
  Clone ID: 701103483H1
cggctcgagcttcctttgtaatagaaagcacgcgtttctctctctccctctctcaacgaatatttagtgtacttcctcttttgtgggtagattcaatttaccatgtcgagttcatcggaatactctcaattttccggccagaaaccggcgaggtcgccggagaaatcgagcttctctcagacttgtagcctgttgagtcaatacatcaaggagaagggtagcttcggagatcttaccctcggaatgacat

SEQ ID NO: 22508 - DNA, 250 bp, Glycine max
  Clone ID: 701103484H1
aaatcatggatttcttgcaagcacaagaaaatcagatacttgtgggtgtggccgtggccgttgtagccattgggattggtgcagtatatctctattcatccaagaagaccaaaggttgcttggacccagagaactttaaggcattcaaacttgttaagcgtgcacagctgagccataatgttgcaaagttcacatttgcactcccaacacctacatctgttttgggtcttccaattgggcaacacataag

SEQ ID NO: 22509 - DNA, 248 bp, Glycine max
  Clone ID: 701103485H1
caaacaaagaactcactcaaactcaacatagagagagagagagagagagagagagagagagagagatatatgaccgattacgaagagagatacgaagggcacggagaagaagaggaacttcacaattctcatcatcagtctcatcctgattcctctcctttacccacccacgacgatctcaccgattccatatctcgccatggatctcgcgattatgacagagattcttccagaagcagagataagga

SEQ ID NO: 22510 - DNA, 249 bp, Glycine max
  Clone ID: 701103486H1
ctcgagccgctcgagccgttaagattgattactgtgtctatcacgttaacatccattttttacaaatcaaacttgtggatgtcatgtttctaatatccattttgcattccctcgaatctcggaacccctcacgtttctaatatccgttctgcaacttcccaaatgttgcaacgtcgtcgctgtcgtcattgtggccaccgcgtctgccattcactgcttccctctctgcaacggcgcttcgcagtctca

SEQ ID NO: 22511 - DNA, 253 bp, Glycine max
  Clone ID: 701103487H1
attgtttacacgaagccaagggcaaacccaatccaataaacaacactgttcagagacccgtgagtcttcgtcagttccaattcgttaccgcgaaaatgaacgaacccacgagaaaataccgcaagaagaacgaagaaggatcaagatcaacccagaagaataacaagaagaaagaactaaagagcatcctcacttcgctcttgttcgtggatgcaggagagaaaaatgaagaacaacacaagaaaaaggagga

SEQ ID NO: 22512 - DNA, 112 bp, Glycine max
  Clone ID: 701103488H1
acacgattgtgctatgccctgtcctgtaataatctacttcgatagtcttgggtggatgtctttgtagccttgatcgttgttattgaaattcatcctcattttctgtacctct

SEQ ID NO: 22513 - DNA, 256 bp, Glycine max
  Clone ID: 701103489H1
ctctcaccatggaggcgcaaccaccaaccccctcgactgcaccgccgcctctgccgccacacctcagctaccccgactccgtggaatcctcgcctcgctcccgcaacaccgactcctgggacgagcccttcgcgccggcgtccaccaagctccgtctcatgtgcagctacggcgggcacatcgtcccccgtccccacgacaagtccctctgctacgtgggtggcgacacgcgcatcatcgtgtccgaacgcgccac

SEQ ID NO: 22514 - DNA, 227 bp, Glycine max
  Clone ID: 701103492H1
aggaataataatgttttcttctctatgcttttacttcatgagaatgatccggggacatggaggaaatgccagtgctgtgaccacgtgagggctcggaaaagttggatttcctccatgtccccggactattctcatgaaggaaaagcaaagagaagattatataaggaataataatgtttcctatacttggcgttggcctatttatggtgcaatatttagaggttaca

SEQ ID NO: 22515 - DNA, 245 bp, Glycine max
  Clone ID: 701103493H1
tctcgagccgaatcggctcgagattcctagttcttagaagttacttgccttcagcaatcagcacagtatgaaaagataaataactgggaatacactgaagaacacagctacagatatttatcttttcatactatgctgattgctgattcctagttcttagaagttacttggattccttaccagaaaagaaagtagaagcaaataggcgaaataaaagtgggggcctcaccaccacagctggcgct

SEQ ID NO: 22516 - DNA, 256 bp, Glycine max
  Clone ID: 701103494H1
attttccacaatgtaactgtgatgcaatcaaataggttaagatgtacaaacaacagaatgatacttgtaaatatgggaagaagtgcgacaacagaaaatcgctctcgcccctccctcttcgtccttccgcctccgcagccgcagcctcaactccctccgcctccgccgcatcttcgacatgttcgacaagaacggcgacggcaccatcaccgtcacggagatcagccaggcgctgagcctcctcggcctggacacc

SEQ ID NO: 22517 - DNA, 254 bp, Glycine max
  Clone ID: 701103495H1
gattcttccagctgataaaccatggtgttagctcatccttggtggagaaagtaaagttggagattcaggatttcttcaagcttccaatgtcagagaagaaaaagttttggcagagtccacaacatatggagggttttggacaagcatttgttgtgagtgaagaccaaaaacttgattgggctgaccttttctttatgactactcttccaaaacatttaagaataccccacttatttccacagctccctcttcct

SEQ ID NO: 22518 - DNA, 251 bp, Glycine max
  Clone ID: 701103467H1
ctttttctcttacaagctactagaacaccgtttgctttgctctcacttcattttgcaaaacctctgggtatctaactctgcagccatgggaagtttggaagttgaatcaacaaatggtcacacctcaagtcctcacaaaaaaactgaaaaatcggagagagagaggagaattgatgagtggcttccaattacttctaaaaggaatggaaaatggtggtattcagctttccacaatgttactgccatggttg

SEQ ID NO: 22519 - DNA, 238 bp, Glycine max
  Clone ID: 701103496H1
ccccgctggtgatccttcagctgagaggttgcgctccaaatttcagcacctgacgttgcgatgatgaaccatggtatggtattgagcaagaatataccttgttgcagaaagatgtaaattggccacttgggtggccacttggtgggtttcctggaccacagggcccatactactgtggaactggtgctgataaagcatatggccgtgatattgtagatgcacattacaaagcttgtat

SEQ ID NO: 22520 - DNA, 249 bp, Glycine max
  Clone ID: 701103501H1
attttccataaaccacattctcgttggttctctttcaatggagtctaagcttttaagagccaccaccatctcagtcccttcaacaccctcatgcgctttccatcgcacaactcgcaaggcttcgatttccttcaaccccacctcggatttcgccccaaaaagcaatctttctctccaggcacatgcggcttccatcgagtcagtgccaacaaagaaaagaattgatgagagtgacacctgacccttgat

SEQ ID NO: 22521 - DNA, 252 bp, Glycine max
  Clone ID: 701103438H1
gaccatcaaagtttcacttcagccttatccggtttagggtttcggtttttgacccaacctttgacgtatcgaaaccttaagtttcggatcaggtctgagcaatctggttggtagaacctttggtcttagagagtcaagttttatgtctgaattagacgatcaaattcctactgccttcgatccttttgctgatgcaaatgctgatgactcgggtgctgggtcaaaggagtatgtgcatattcgcgtacagca

SEQ ID NO: 22522 - DNA, 253 bp, Glycine max
  Clone ID: 701103439H1
ctcgagccgctcagcttacccaactaaactatgtgattaaataacttaagcagagacattaaggcgcacaataatgacagcgaaacaagggaaggaagggataattgagtgtgtggtgtgtagtgtggcagctccgtcagcgtgagatggacgccgcagcaacaggttcggagctgaacaagtccggaagcggaggttcggagcgaagtgaggacagcggaggagggatatttgagtactctggctgggttat

SEQ ID NO: 22523 - DNA, 256 bp, Glycine max
  Clone ID: 701103440H1
tgagaacatcccaattgttctttgcggtaacaaggttgatgtgaagaacaggcaagtgaaggcaaagcaggttactttccacaggaagaagaatttacagtactatgagatttcagctaaaagcaacctacaattttgagaagcctttcctgtatttggccagaaaacttgcaggtgatcctaacttgcactttgtggagtctccagcattggctccaccagaagttctaattgatgtagctgcacagcaacaaga

SEQ ID NO: 22524 - DNA, 256 bp, Glycine max
  Clone ID: 701103441H1
cttctaacacatacactactctctctctctctcttattgtatggccgccaattccagtagccgagggatcaccgccttagggaagcgagtcgccaaccggatctggacttccaacgcacctcctctcacttcaaggaggggagcatacagtagcggctcagtgtacgacaagaaccctgatgatgagatccagtctgggcaggtcccagacgatgtgatccaggcggcaacacaatccggcaaatactgggcccca

SEQ ID NO: 22525 - DNA, 259 bp, Glycine max
  Clone ID: 701103442H1
cggctcgaggtttcgaatagattatcctaagtctttgggaatagtgctgcaatggcttcaagtcaggaggaggtgacccttttgggagctactggaagcccatttgtgtgcagggttcatattgccctcaagttgaagggagttcaatacaaatatgtcgaagaaaatttgaggaacaagagtgaactgcttctcaaatccaacccagttcacaagaaggttccagtgtttattcacaatgagaagcccatagcagagt

SEQ ID NO: 22526 - DNA, 258 bp, Glycine max
  Clone ID: 701103444H1
atctttctatcctctctctctctctctctctctctctctctctcttttccttcggagtgtgttcgcagattgatgacaagcaaccccattacgtggaagcctaagaggagaagacgacgaagaggacaaggttaactgaatcgccgcttctgtgtggcttcgttctttcgttttagttttttcatctttatagctttagagggtaatacattctttaaaaaaatggaggttttggtgggtcccgctttcaccatcgac

SEQ ID NO: 22527 - DNA, 259 bp, Glycine max
  Clone ID: 701103445H1
gatttattaaaaagacttgttttgaataacttttgcaccatacccgcaaaacttgtcttgcagctcacaacagcatttcgagagcgtggtttatgtaacaggaatgggacctttttttacaaggatcatctacacaaaagcaatacccctatcttagctattgctggagaccaggatctgatttgcccacctgaagctgtggaagaaaccgttaagctaattcctgagcacctggttacctataaagtttttggagaac

SEQ ID NO: 22528 - DNA, 258 bp, Glycine max
  Clone ID: 701103446H1
cggctcgagaagtctttctgcttcaaaatagacttatttaaggatatttgttgaacaacttgtgtcttgttgagttattgctgtttgaatttcatgtaaaatgatactagctatatgtaaatcccagaaaaaaaaaaaaaagaatcctaggatcttgttttcgttttggccatttcagttaataaagaaattatatttttcgaaaaaaaaaaaaaaaaaaaaaaaaaaaaaaaaaaaaaaaaatgaaaaaatatgagt

SEQ ID NO: 22529 - DNA, 261 bp, Glycine max
  Clone ID: 701103447H1
cgaacccgaaccaactaccaccacggtcaacgacatctcaaaccacaatgaacaagatcgtcctcttcgccgctcttttcgccttcttcttcatcctcattgaggccgctcccatgaagatcgtccctcagcctgctgcccctgcccccaaggccagcgtttgcgatgcctgcactgaggtcattggtctcctcgagtccgctggacttttgaccaactccaccgccactcagatcgagaccgccctcaaccaagtctgca

SEQ ID NO: 22530 - DNA, 233 bp, Glycine max
  Clone ID: 701103448H1
cagtgtttcatcatttgggtttcgcagaagagagagaaacccatttctagagagagaaactcgcagtcgcagacatgtcttccttcgatgccttcgccgacgacttgaacgtcaactacttcttccactcgccagcacgacgatgacgaggacaacttctctggctacggcggctactcctccttcaccggaggattctccgccgacggagatgtcgcggtcgatcacaccgc

SEQ ID NO: 22531 - DNA, 251 bp, Glycine max
  Clone ID: 701103450H1
gagaaatcaaagtctttgggttccggggggaggtatgcagatctttgtgaagactttgacagggaaaactatcaccttggaggttgaaagttcagacacaattgataatgtcaaggcaaaaatacaggacaaggaaggtatccccccagaccaacagaggttgatctttgctgggaagcaactggaggatggaaggactcttgctgactacaacattcagaaagagtctactcttcaccttgtcttgcgtc

SEQ ID NO: 22532 - DNA, 252 bp, Glycine max
  Clone ID: 701103451H1
cgcactctcttttcttcctcagaaacacatcctaatggcagagcgcggaggtggcgatcgtggcggcgaccgtggcggtttcggacgtggattcggcgggcgaggacgcggaggtgacaggggccgaggccggcgccgaggcccccgccgcgaggaagaggagaagtgggtcccagtgaccaaactgggccgcctggtgaaggagggaagaatccgaagccttgaacagatctacctccactcgctcccgat

SEQ ID NO: 22533 - DNA, 249 bp, Glycine max
  Clone ID: 701103452H1
ggcgttggtggtattgaagcagaggcagcaatgcttggccagcctatgagcatggtgttacctggtgttgttgggttcaagttatctggaaaactgcgcaatggtgttacagcaactgacttggttctaactgtgacacaaatacttaggaaacatggtgttgtagggaaatttgttgaattttatggtgatggtatgggtgagttgtcattagctgacagggccactattgccaacatgtctccagaa

SEQ ID NO: 22534 - DNA, 252 bp, Glycine max
  Clone ID: 701103453H1
atcccaacctgcataagcggaggtcacgcttggggtcaacaagaaggaggacctgaaatgtaatcgaataatatggaaactagaaggaagttgaacgatcagagatgacaatagcaagcttcgacactagcccagacgcgcgaacataaatataaaaaaaaaacaaaaaaaaagacaaaaaataataaaaaacaaacaaaaaaagaaaccatagtaactcaaaagcaaagaaagccctagacttaggcaacc

SEQ ID NO: 22535 - DNA, 242 bp, Glycine max
  Clone ID: 701103454H1
ggctcgagctccattgaggagttgcatgagacttgcaagcctttcttactctaaatctcagcctctaacacttgcaggcctcttcacccttgtcctcactctcttcctattcctctgctccacccaagtctgtttcaacgcaagagaaacaacaacagaggagtaagcagccacatgctgtcaccaccccacgatctaaaagaagaaagaaccagcttaagaaagtttgtcaagtaccagtt

SEQ ID NO: 22536 - DNA, 253 bp, Glycine max
  Clone ID: 701103455H1
cctcgacgaaatcaaggaaaccctaactcgtcaattttggggaatggcctccttcctcgctccaccgccatcagattctcattctccatccgatccctcttcgttcgtttccgatcaatccaatcatcgcgctgtttctccgaacgaagtaccgcaattggatgacgctgcgatttccaatcactctaattcggtttcggtgggatccgattcggatggggattgtggtctcgcgcaacgcgcgttggaatta

SEQ ID NO: 22537 - DNA, 253 bp, Glycine max
  Clone ID: 701103456H1
ctcgagccgctcgagccgattcggctcgaggtggccctcatggtgatgctggtctcactggcagaaagatcactcattgatacctatggtgggtggggacctcatggtggaggtgccttttcagggtaggaccctatcaaggttgacagaagtggtgcctatatggtgaggcacgctgcaaagagtgttgtggcaaatggccttgccagaaggtgcattgtccaagtttcctatgcgattggtgtccctgagc

SEQ ID NO: 22538 - DNA, 258 bp, Glycine max
  Clone ID: 701103457H1
agaacgttgaaggcattagaaagttggcgagctatatctgataaagaggattgtgatgctgaaattgctggttcagagtgcatggattattcagaagttgtaccatatgtccaccaggcgtttctggcagattggaggccacacacatctactcttacttatcctgaatgcatttccactacatctagagatcaaaatgttgctcacaatgcattttctcaaaaagatattcaattttataggggtactcatgattat

SEQ ID NO: 22539 - DNA, 260 bp, Glycine max
  Clone ID: 701103458H1
cataagcaaaagcaacggtgaactgaagatgccggttctcaccctttctactaacgttagccttaatgatttagacgcctcttcgatactctcccaagtaatctccaccgtcgccagcatcatgcgcacacctgagcctgtatcactactttcccccctctctctatgatatctatatatgaccatgatttatagcgttgatgttttatatatagaattaagttgaaagttaattcatgaaaattatttcaccccatcct

SEQ ID NO: 22540 - DNA, 257 bp, Glycine max
  Clone ID: 701103459H1
gagagaattaggaatggatgaggatcttcctgctgtattattgatggggggaggtgaaggtatggggcccattgaggctactgctcgggcacttggagattcattatatgacgagaatattggggctcccgtaggtcagatccttgtgatctgtggtcgtaataagaaacttgctaataaactgagttctattaattggaaggttcctgtgcaggtcaaaggatttgttaccaaaatggaggaatgcatgggagctt

SEQ ID NO: 22541 - DNA, 260 bp, Glycine max
  Clone ID: 701103460H1
ccccaaaccaaaccctctctcttccggcgttctgcgcgtcccgtcgcggcgattcccccctccggttccctctccacccttcaattcaaccctctcgtcttcgcttcactgattccctctttcaaaatgcttccgatcgcttgctagggttttccctctcccaaatctcctcctcggaaagcaccctgtaccttttattcctccgactaatcaacttctttgctatggctattcgtgtaaccttttccttttcgggctat

SEQ ID NO: 22542 - DNA, 263 bp, Glycine max
  Clone ID: 701103464H1
tttatgaccctcgcttgtgtgccacttccaactaacaagaggtattatgctgcaaatatttgcaacctcacttacgttgctgttgatgaatccagaattattgtaaagttcgcttttttcgttctgtcttttcattcttttttcaaagtgaattcctgggattttttgttttcaattgagggcactaaaaactactgtggaactggtgctgataaagcatatggccgtgatattgtagatgcacattacaaagcttgtattta

SEQ ID NO: 22543 - DNA, 192 bp, Glycine max
  Clone ID: 701103465H1
cgtcaacaacgattcctttcggttttctgtttctctggattcattttcatttttacggctaccagaatgtccagctcatcggaatattcggcattttccggcccccgcccggccaagtcgccggccgagaagtccactttctctcagacttgtagtctattgagccaatacatcaaggaaaaaagtgccttc

SEQ ID NO: 22544 - DNA, 241 bp, Glycine max
  Clone ID: 701103466H1
gagaaggttcttgttgatgctggctacattgatgctcagcaacaaccttgaatctcatctgcaacttgaggaagagggggttttgctgttttgatcatataatggcgttgacatagtttagtttatgggcaatttatgttgttttcttgttgcaactgttatttcctagatgtgcatttgtcggatttcttcttcttgtaagcccgttgatgcattcaattagaagctatatacatctacg

SEQ ID NO: 22545 - DNA, 255 bp, Glycine max
  Clone ID: 701103437H1
caaaactccactgagaagaaccaaagaaagaaaggagaaagattgttagttttttttatcagcgaggaaatcgaatctgcgaatttttcctttctttcttttcattttatcacccaatcaatcttataactccaacttcaaaagggtttctctttacctctttcagtgcttctccctttgcccccagtaccgctgtctagcatttagttttaggtttttggagcttctcatattctcacatgggtcttctccttc

SEQ ID NO: 22546 - DNA, 251 bp, Glycine max
  unsure at all n locations
  Clone ID: 701103396H1
cagtatcccccttaccctttaccctacgatccctattctgtcggagtaccctcttcctcgcctcctcctcagcagcgccttcccgtttccaagcctcncccgcctccgccctctcctcctcgctcctcaccttgggactttctcaatttcttcgataacagcgacgacaagtactattcccaaactccttactctgccaccgccaccgccacccccagccgcgattccagggaggtcagagaggaggaggg

SEQ ID NO: 22547 - DNA, 212 bp, Glycine max
  Clone ID: 701103401H1
atcaattgtaatcaacaccaaccgcaacattgattcttcacatgaggctgactcaaacgacggatctggattcgagttgaaaacaagtgcatgcgatgaagcgttgagtttgcttcataatcctcatttatccgaacaagggttgaagactctcttaagcttcagaaacggcgagtttattgagtctttaacaagagtcatgcaaaaggggt

SEQ ID NO: 22548 - DNA, 258 bp, Glycine max
  Clone ID: 701103405H1
cctcgagccgaatcggctcgagctttagtggagctatttggggatcaggagaataatcgtaaagctgttgcatgtttaaatactgatggctactcggattgcaacactttttgcttcattaagagaatttccttttgtccgctttcgtgctgccaagtccctagatgcaaccacaatgactaccttccatgatcttattcctacaaaacttgctgctggtgtctgggactgtcttatgaaatataaaaaaactatacc

SEQ ID NO: 22549 - DNA, 262 bp, Glycine max
  Clone ID: 701103410H1
ctgaaacttcagaagcggcttgccgctagcgttctcaagtgtggtagaggcaaagtttggcttgaccctaatgaggtcaatgaaatctccatggctaattctcgacaaaacataaggaaattggttaaggatggtttcattatcaggaagccaactaagattcattcccgttcccgtgctcgcagaatgaaggaggccaagaggaagggacgtcactctggttatggtaagcgtaagggtacaagagaggctaggctcccca

SEQ ID NO: 22550 - DNA, 263 bp, Glycine max
  Clone ID: 701103412H1
atcgcttcttcttttctccgccccggttctccttgttattgccgatgcacttgttccttctgctctgctctcctcgctttctcaatcttctttctccatggaaactctcgcttcccatttccacaactacgattttcgatactctctcattgatattccccttgtgtcaataatacgatccttcatcatcttctgtgtttatagtttgtgtgatggaccaaggctttcgcatggaccttatttggggatcacgaccatgtgct

SEQ ID NO: 22551 - DNA, 262 bp, Glycine max
  Clone ID: 701103414H1
caaaattccaaaaatttcccctcctatctccttttcacgtcacttaccacaactgggatgctccactttcttaaggattatttgttaactgagtcctaagtgtaattgagatggacggtgatatatttggagaattaggcaattcaactcaagtagatagcaggcttctacaggtatttcaaaagagcttattgcaagctcaagatattttgaatcagaatcggttgctgatcaatgagataaaccaaaaccatgagtccag

SEQ ID NO: 22552 - DNA, 265 bp, Glycine max
  Clone ID: 701103415H1
ctcaggtcaatatggcatactctccacttcaacagctggaatctacacgcgagtctcgctgccacagctgtctagctctctgagggcctacgcgacaagactcaccatggtcccagaatcttccctgttcacgtactgaccggtgaaattctggcacgcgcatagggtatcgaaggatctctcagctcctgggctcgttgcttccatggagcaggatgcgtagctcaaggtgtgatgtgaggcctggaccaggaccaccatggtg

SEQ ID NO: 22553 - DNA, 269 bp, Glycine max
  Clone ID: 701103416H1
tatcactcgatgatcatgcgtgattccagaacatgtgttgagcatttcgagagagttcgagtccggagtgctcagacatgagctgccctcgatgccgtcgccgacgacttgaacgtcaactcttcttccactcgccagcacgacgatgacgaggacaacttctctggctacggcggctactcctccttcaccggaggattctccgccgacggagatgtcgccgtcgatcactccgccgccgcgtcgccggagatctacggcttcactga

SEQ ID NO: 22554 - DNA, 157 bp, Glycine max
  Clone ID: 701103417H1
accacccaagaagccatacaaatacccttctcctccaccacctgtttataagtacaagtcaccaccaccaccgtacaaatattcatctcctccaccaccacctaaaaagccctacaagtatccatcaccaccacctccagtttacaaatacgaatca

SEQ ID NO: 22555 - DNA, 253 bp, Glycine max
  Clone ID: 701103418H1
tttccatcttagttcctggaggcaccaggaacctgacccaataaacaaacccttttttttctttctaatttttctaaagtttcattttttaatccaatggcaccttgggtattatcagaatgtagcttgaagcctcttgctccagtaatccctagacctagaactggggcagttttgtccagcacctcaaaggttggatttttggagacaaacaaggtattggaaggttctaagtttcaacctttgaggtgta

SEQ ID NO: 22556 - DNA, 254 bp, Glycine max
  Clone ID: 701103419H1
aatagtccaccttcagtgaagttcacctcagagatatggcaccccaatgtatatcctgatggccgggtttgcatatcaattcttcatcctcctggtgaggatccaaatggttatgagcttgcaagtgagcgctggacacctgttcatacggtagagagtatagtattgagtatcatatcaatgctttccagccctaatgatgaatctcctgcaaatgttgaagctgcaaaggagtggagacataggagggatga

SEQ ID NO: 22557 - DNA, 256 bp, Glycine max
  unsure at all n locations
  Clone ID: 701103420H1
cggctcgagctcgagccgattcggctcgagatggccgtacccttgccgattacacacattcagaaccangacaccctccacctggtgctccgtcttcgcggtggcatgcaaatctttgtcaagaccctcactggaaagaccatcacccttgaggtggagagctctgacactattgacaatgtcaaagctaagattcaagacaaagaaggtatcccaccagaccaacagaggctcatttttgctggaaaacagcttg

SEQ ID NO: 22558 - DNA, 238 bp, Glycine max
  Clone ID: 701103421H1
ctttctctcttcgcctggtcttggcatctccgcagcaccaccacccaccaccctgcttagaccaggtcctctctctctctagagagaaagagaaaaaaagaaaaaaaaaaacaactaacattaagcttttaatagtaagacatggctcaacccagtcccaacggggatctgaataataaccagcaatagggtcaggttcaacaataataccagcacggacatttggcggcggcggcgc

SEQ ID NO: 22559 - DNA, 254 bp, Glycine max
  Clone ID: 701103422H1
actgcaaagaccaaggtaattaatagctgcttgaatcctgtttggaatgaagagctgaatttcactctgacagaaccattgggagttctgaatttggaagtgtttgacaaagatcttttgaaggctgatgacaagatgggaaatgctttcttgaaccttcaaccaatagtctctgcagccagattaagagacatcttaagagtgtcctctggtgagacaacattaaggaaggtcatacctgatggtgaaaactg

SEQ ID NO: 22560 - DNA, 253 bp, Glycine max
  Clone ID: 701103423H1
ctcgagccgagcctttctccctaaagatagtcctcttcgcaaggatccggcatactatgtacttaacgaagacgaatctccttgcatttttggttctatcgagaagcagaggtggtcttatgcatgtgcaaaacagttgattgagaggctgatttttgctgagggtgctgaaaatggcttggagttcacaattgtaaggccatttaactggattggacctcgaatggatttcattcctgggattgatggtcca

SEQ ID NO: 22561 - DNA, 261 bp, Glycine max
  Clone ID: 701103425H1
ctcttctctctatcgtctccttcctctgttccattagggtttcctctttctccctcggagcttccaattgaaatccaattcctcaatacctccacactttctcgttcggaaagctcgcgaattcgaaagacatcgacggctccacgtgatacgttttcttcctctctggttatcaatgttggctcactagtgcagttgcatctttgcccgtattaccaccagtgagaagaggtggccaccacattgaacagaatgttgttt

SEQ ID NO: 22562 - DNA, 257 bp, Glycine max
  Clone ID: 701103426H1
gttgtttctgaggctgatatctttgtcaccaccaccggtaacaaggacatcatcatggttgaccacatgaggaaaatgaagaacaatgccattgtttgcaacattggtcactttgacaatgagatcgacatgcttgggctggagaactaccccggcgtgaagcgcatcaccatcaagccccaaactgacagatgggtcttccctgagaccaacaccggtatcattgtcttggctgagggtcgattgatgaacttggg

SEQ ID NO: 22563 - DNA, 262 bp, Glycine max
  Clone ID: 701103427H1
tcccaacacattctggtcaccggtggtgccggtttcattggcacccacaccgtcgttcagcttctcaaagctggcttcagcgtttcaataatcgacaatttcgataactccgtcatggaagcagtggaccgcgtccgccaagtggttggccctctgctttctcagaacctccaattcacccagggcgatctccggaatagggatgacttggagaaactcttctccaaaacaacatttgatgccgtgatccactttgctggct

SEQ ID NO: 22564 - DNA, 261 bp, Glycine max
  Clone ID: 701103430H1
ttcaactcttctctttctctgtcgaagaacaagtagtttcagaaagatgctagagaatcttcaggctcctccgtcaacaacggaatcggccccagtggtgaagcgctatgctccacccaaccagaggaaccgttctgctaacaggcgcaaatcatctgatcggcttgatcggacaaacagtgtcgggaatgacttagaaaagaatcaagttgcttcttcaagaagtgttcacattccagatcatgaagatgctggtagcag

SEQ ID NO: 22565 - DNA, 263 bp, Glycine max
  Clone ID: 701103431H1
actcaactcaatcgcctccactctctcccgcaaaccattcttcttctcttctctccctctgagcctttcatcgctcctcggagagatggctgcgtccgaagaatcatcaaccactcagatggttggcaatgctttttttcagcagtattactccatattgcatcaagagccagaccaagtccacagattttaccaggagtctagcatcctacgtcgacctgaagaagatggtaccatgacaatggtgactactactctggaaa

SEQ ID NO: 22566 - DNA, 264 bp, Glycine max
  Clone ID: 701103432H1
cgaaacttgatctgcctttgctttgttatttcattaacagcacccctttgggccatatattggttacctcaactgcttttctgttcatctttccagaattattgtaaagttccctttttttgttctgtcttttcattcttttttcaaagtgaattcctgggattttttgttttcaattgagggcactaaaaaaaaagaactgactggaatttccatttgtcttgctgggtccctgagatttgaagtgtgttgttttccttttgg

SEQ ID NO: 22567 - DNA, 226 bp, Glycine max
  Clone ID: 701103433H1
taagtagcaagctagatactcaagcctatggtgatcatacctgtataatagcaaaagaacatttggagcctaacttaggagggctcactgttgagcaggctatccaaaacaagaagttgttcatcttagatcaccatgactatctcattccttatttgaggaaaataaatgcaaataccagaaagacttatgctacaagacccatatttttcttgaaagatgatgg

SEQ ID NO: 22568 - DNA, 133 bp, Glycine max
  Clone ID: 701103395H1
tgggttcaacaggtgagactcagattactccaacccatgtatctgatgaagaggcaaccttttcgccatgcaactagccagtgcctcagtactccctatggttctcaaatcaggtcttgagcttgatctgttg

SEQ ID NO: 22569 - DNA, 252 bp, Glycine max
  Clone ID: 701103434H1
agcattttccccttcccagacagatccaagaaccacaggtactcactcttgagatcctgttttctctttttctcgttgcgtgtcttctgctgctcacacttaacgcgttttcttttttctccgaattaaacgcgaccttatcttcttcttgctctcttttatcagtgctcttttttgagccaacggtgctgattctttcccgcggaatcttgctcggcgttggggtgtaagtcatttgtcaattcccttgga

SEQ ID NO: 22570 - DNA, 250 bp, Glycine max
  Clone ID: 701103435H1
atcgttttagttaatttcaaaatgaagaaacgatggagtgcatgaatcttagaataatgattagcgattctgtgggattgttaggggaaaaaggtgaagaatcgaatcggtacgaacgtgattcttagctggagcgcgatgggggaagattattgtgaagatttgtctcgatcgaccagaaaagcccgtttactttttataaaaaaaaaaaaaaaaaacttttaaaagggggcgaacctttcatattcac

SEQ ID NO: 22571 - DNA, 246 bp, Glycine max
  Clone ID: 701103436H1
gcaacttgtattgttgctacaaggcatataaattttcatcattgcaagttgcaaccattttgaccaaaaaccaataataagctttcgaccaaaagaagaaagaagaacccatttatcatcgttggaaaaaatcccagatctcaaaaaatggaattttcgcagagtcacagggtagagatgataagcatggcagttgctcttgttgccattgttggtggcaccgcttactattactacgtcaccaag

SEQ ID NO: 22572 - DNA, 257 bp, Glycine max
  Clone ID: 701103359H1
cctcgagccgattcggctcgaggaagatggagatgtatcagatctacagcaggagaatagcgctgggagcgttcgcgtttgcactgcttttcctatcggcctcagcagacgacgtcgttgtgctctctgaagataacttcgagaaggaagttggtcaggacagaggagctctcgttgagttctatgctccttggtgtggacactgcaaaaagcttgctccagaatatgaaaagcttggtagcagcttcaagaaagcc

SEQ ID NO: 22573 - DNA, 260 bp, Glycine max
  Clone ID: 701103360H1
cctcgagccgaatcggctcgagcaggtgtcaccaagagttccagcacgtagctatcttgtcaacactgtttcctacgagctgactgtcctttgcactagagggccaagaagaatgcattgtgtcatgaactctatacctgtctcagctattcaggaaggaggcaacgccccaactccaacatctttccctcaaatatttgatgaacctttttctccatcaccagcactgaaagaaaaagctcaagtcacagatttaaact

SEQ ID NO: 22574 - DNA, 259 bp, Glycine max
  Clone ID: 701103362H1
cagcaatccagctcccggacccgccaagccccacggccgcgcgtggcactccggacatcttcgaatccggcgtccacaccctcgtccgccgcgccgtcgtcatcggcaacggcttcccctcctccgagaatcacagcatcggtttgctccgcgcccttggcctctcccacaaccacctcctctaccgcgttacgaggccgagaggtggaatcaacgattggctccattggcttcccctctctgtccatcgaaaatttca

SEQ ID NO: 22575 - DNA, 260 bp, Glycine max
  Clone ID: 701103363H1
tcggctcgatacgaaggagatagtgaaagagcttcttgctctaattcgagtgtacaaggatggcagcgtggagcgtcttctaagctctgaaaacgtggcagcctcccctgaagatccccaaactggagtctcatccaaagacatagtcatcgcagacaacccctacgtctccgttcgcattttccttcccaaatcccaccacactaacaataaactccccatcttcctctacttccacggtggcgccttttgcgtcgaat

SEQ ID NO: 22576 - DNA, 182 bp, Glycine max
  Clone ID: 701103365H1
tttggctccaaatgttgttgacagagtagacaaatgctccacattgaagtgtgtattcggttctcatactgaattaatgcaatggtttcacttcaaaagattctcaagtggatatattcttttaatgaaaatctatatgtgaaaatttctcccattgcaagaaggaaatggccgcatacttt

SEQ ID NO: 22577 - DNA, 236 bp, Glycine max
  Clone ID: 701103366H1
cgcctcagtagaccatggcctcattgggtgggttacaaaatctaagcggcatcaattttcttatcaaaaaagagggtccaaaagtcaatgcgaagttcgagctgaagccgccaccatatccactgaatggtttggagccggtgatgagccagcagacacttgagtttcatttggggacacaccacaagacatatgtggaaaatctgtaaaagcaaatcgttgggacagcgcttgat

SEQ ID NO: 22578 - DNA, 258 bp, Glycine max
  Clone ID: 701103367H1
caaacaaagccctagcatgaaatcatccttcgaagaaaaataattccaatcaatcctagaatccaatccctcccctttgaatttgatgcctcctcgcattcaattccacgctctggtggcatcatcatcatggatcgtggtaataacaacaataacggcgttgttgttgttgtcgtttgggtgcgaacggggacacgctctgaaggtgccgtttagagtaaacgacgtgctccccgtgctgccgcgcgagatctcgtg

SEQ ID NO: 22579 - DNA, 255 bp, Glycine max
  Clone ID: 701103369H1
ctttctagaaacatattatgcccaaaatgtaaagggaaaggttcaaaaagtggaactgctggtaggtgttttggatgcaaaggcactggtatgaaaattacaagaaggcagattggactaggcatgattcaacaaatgcaacatgtctgtcctgactgcagaggatctggtgaggtcattaacgagagagataaatgtcctctgtgcaaaggaaacaaggtttcccaggaaaagaaggtgctggaagtgcatgtt

SEQ ID NO: 22580 - DNA, 256 bp, Glycine max
  Clone ID: 701103370H1
ctcgagccgctttctttgtctcttattgagtttttggcttctcacttctttttttctttcacactctcaacgaagtgatttataacagtgtttaattgaaattccaaacatggattggcgtcgaggagacgctgtcggacgaggaagctttgctaccgttagtttagctattccaacgacgaattacaatcagtttccgtctctaaccgtggttaagtcggctgacgctcaaacctcgtgctggctcagaaacgag

SEQ ID NO: 22581 - DNA, 253 bp, Glycine max
  Clone ID: 701103372H1
attttgagggcaatgatgttgacctttaaagtttcgttatgaagtaatatgaaagtggtccttatacggttacaacagcatcaacaacatcattagcaacaaaagcaaaaacaccaccaccaccaactagaacaaaaagaagaacatgtcgttttacattggtcgcgaggcttccaagctgtggaagagattttatgcagagacaacaaccgagctcaacctccttgcggagaattggaagtaccttctcgct

SEQ ID NO: 22582 - DNA, 161 bp, Glycine max
  Clone ID: 701103373H1
taaaaccctcctcgttttctctctctacttgcagatcacgccgcaccaaccgttgtggttgtggattcggttgggcgtctacagtcgctatggcttcagcttcgtcttcgtcctccaagctatgcttcaattccgactgcaaagaggttgaagtccgaaag

SEQ ID NO: 22583 - DNA, 168 bp, Glycine max
  Clone ID: 701103374H1
caaactagggtttgtttgtgtggcagaaggaggaatgggaaggtatcgtagccggagcagaagctatagcccccggcggcgaacagaagcccaccggcaccgcgcggacggaagcgctatgtcgacgatcgctacggtgacagcaggtcttacagagaccgccgctca

SEQ ID NO: 22584 - DNA, 252 bp, Glycine max
  Clone ID: 701103375H1
cttatctccaattgcaacatactaagtgggttggctggtttagatctgagcaacagcttttaattttctacttgcttgaattttattggaagccatggattgttcatcatggattaacacttccttggatctcaacattaatccccgcagagttcatgaagaagttcccaaggaggtagaaagcgagcttttctctttgggaatgaccaagtttaacgtggaagaagagtctactagtgacttggaggagga

SEQ ID NO: 22585 - DNA, 257 bp, Glycine max
  Clone ID: 701103376H1
tcgaacactgctactactactactttctctctagatatgggttcccgcgctgtgcaactgtctttcatcttggggctcttggctagctcatgcttagcccaagcaccaggtgctgcaccgtcacaaccacccactacaaccccatcaccaccaccacccagatcagcacctgcaccagcacccaccacaccagcaaccccaccaccagcaaccctaccaccagcagcaactccatcaccagcagcaactccaccacc

SEQ ID NO: 22586 - DNA, 256 bp, Glycine max
  unsure at all n locations
  Clone ID: 701103377H1
caacctaccnncaccctttccttcttcctctaaacacctccacccccctccgcccgccgctcccctctccgtgcgccccttccctccgcgcgccgctcctcggagccttattgcagcaaatagggagacgaaatgggccttagaggaaataggaacaaatatgaaacacaactggctcaaagaaatttcaaaagcaatgatactcagaatcacatacaggaacaaaacaccatggaactttattcacgagcaaggg

SEQ ID NO: 22587 - DNA, 245 bp, Glycine max
  Clone ID: 701103378H1
tttttgcagtctagagatcctcgatttcatgcacttcctcttgcatctcaaagagttgcagcatttacagatacagttaatgaacttgtatatgatgtcctcatatctaaagtacggcaacgcctcagtgacgtgtcccgtttgccaatttggtcatcagtcgaggaacaaggagcctttcctctccctaccttcagtgcatatccacagtcatatgtcaccagtgttggtgaatatcttcttac

SEQ ID NO: 22588 - DNA, 256 bp, Glycine max
  Clone ID: 701103379H1
ctttccctttgacaactgcaatctaaggtagaaataacaaacacaacatgggttctttgggcacaatcaacaagccacatgctgtgtgcataccgtacccagcacaaggccacataaacccaatgctaaaactagcaaaactccttcacttcaaaggctttcacataacctttgtaaacactgagtataaccacaaacgccttctcaaagcaagaggccctgattcccttaatggcctctcttcatttcgctttga

SEQ ID NO: 22589 - DNA, 156 bp, Glycine max
  Clone ID: 701103380H1
ccttaagttacgtaacagttgtttcagttcctaatgcgcaaacgtatcaacactttggaaaaaagataaaggggtttaacattcctgtcctataatgcaatgccattatagaattacttgcctgcctgaattgaaaaggtggagattgttaagatt

SEQ ID NO: 22590 - DNA, 146 bp, Glycine max
  Clone ID: 701103382H1
ctcctccatttctgtgcctcttctctgtcgttacgaccctctctcctaaacggcgtaacggaaggagtcacgtgacgtgccgaagagaaaggaaaaggttgatggctttagagcaggatggtcagaataggcacacaaacggcgta

SEQ ID NO: 22591 - DNA, 125 bp, Glycine max
  Clone ID: 701103383H1
actcgagccgaatcggctcgaggagagatgaaggcatagaccttttgaaagacaaacaagctcatcagcgtctcactgagacagccgagaaagcaaagatggaggtctcaacattgactcaaact

SEQ ID NO: 22592 - DNA, 146 bp, Glycine max
  Clone ID: 701103384H1
caaggatcgatgtgggcagcttcttgcctggcgtcatgctgcgcggcctgctcatgcaacgactgtaggaccgtcgtatctggaatcagccgtcgttccgccaagatcgcctactgcggactcttcgacttctctctcgtcgtcgg

SEQ ID NO: 22593 - DNA, 254 bp, Glycine max
  Clone ID: 701103386H1
ctttaatgtgaaagggttggaacggtttttgattttaaccctgcaaagagccttcctttgcggtttttcttcttgagaagaagaaggctctttgttgttgttgattttgaagaaggaaagaaggaaggaagaaaatgatgaggctatggatttcttatctgcaatacgcggaactttttgtgagttcattggttcatatgcactatgggcttcacatatttagctccgctgtggctggggatctctcacaggct

SEQ ID NO: 22594 - DNA, 94 bp, Glycine max
  Clone ID: 701103388H1
cccattctttctcattcacacagcatcatgggcgtcaaaggttttgttgaaggaggcatcgcttccatcatcgcaggatgttccacacaacata

SEQ ID NO: 22595 - DNA, 148 bp, Glycine max
  Clone ID: 701103389H1
gaaaatcacacaaaagcacacacacacacacccttcttcgatcctgagtttgtatcattgacgatttttgtcacaaagggttgttgtctcttcagagagacacagatcttgaggtttgaggcaaaatccttcacacactttggtggtt

SEQ ID NO: 22596 - DNA, 216 bp, Glycine max
  Clone ID: 701103390H1
aactccgacaccaaaaaaccattccaacgaagaagagagttagttagttctgagtgagtggttcctctcaagaagcgtccagcgtagtaacgctgaggaccttcactctcaagttttcaaccgtttgttttctatataatatccctaaccgccgtggatgggacaatctgtttcctccgccgccgtcgcaagccgtcgtgagagggatccaggcca

SEQ ID NO: 22597 - DNA, 198 bp, Glycine max
  Clone ID: 701103392H1
gtttcgatgacaagacaactttgaggttgagttgcacaaagtactgtatcgcgtcaaagcgtagaggttgcgttcatgctcataaaatctgtattttaaagctgatgccatgagttgtatgtagttatgatgattcacattctttcattgctatttacagttttattttacagtaatataaaacattctttatggttc

SEQ ID NO: 22598 - DNA, 256 bp, Glycine max
  Clone ID: 701103358H1
cggtcactgggttgctgaacctgaacctcaaccatgtccatggcgtcttcagtttcattttctgaggaaagtagttggggcaaaagggtatctgaaaaggttctttctttctacgcttctcttcccaaaaagggcaaacctcaaggccgtgaagtcaccgttttggccgctttccttctctcttctccttccaatgatttgaaggttgttgcaatgggaacggggacaaagtgcattggacgttctctcttgcgca

SEQ ID NO: 22599 - DNA, 255 bp, Glycine max
  Clone ID: 701103394H1
gaactcacaaaggacagaagaaacgcgaatgccaggagaactccaattaccacccgggttcagattccaccccactgacgatgagcttgtggatcactacttgtgtagaaagtgtgctgcacaaaccattgctgttcccatcatcagagaaatcggtttgtacaagtttgatccatggcagcttccagagatggctctttacggtgagaaagagtggtactttttctctcctcgagaccgaaaatacccaaacgg

SEQ ID NO: 22600 - DNA, 263 bp, Glycine max
  Clone ID: 701103319H1
cctagatctgagaccacctaccagattgctttgtctatcaaggacgaagtggaagaccttgaaaaggctggcatcactgttatccaaattgatgaagctgctttgagagagggtcttccactgaggacatcagagcaagctcactacttggactgggctgtccatgccttcagaatcaccaatgttggtgtccaggataccacccagatccacactcacatgtgctactcgaacttcaacgacatcatccactccatcatcga

SEQ ID NO: 22601 - DNA, 88 bp, Glycine max
  Clone ID: 701103321H1
cagcagtcggagaagatgccatatctcaatcatttcagcatcgccctcgccggaaataaataataaccatattccattcactttttcg

SEQ ID NO: 22602 - DNA, 264 bp, Glycine max
  Clone ID: 701103322H1
gcagctttggaaaacccaaccagccaacagatgttggtttgattgtgtggacttaggagtgaatagtttgatatatgcgcatggaaggaagagaaggcttcagttctggggttacagtgataggggcagaagctccatcagcctatcatatggcaccaaggagtgaagctccaagtcaggttcctcctcctgttcctgaagcaacagctggagctattggtgtctcacctgtgagtgtgggattggatggaacagcagctaaga

SEQ ID NO: 22603 - DNA, 261 bp, Glycine max
  Clone ID: 701103323H1
gctgtctctgtcttcctttgtggctgacgatgttgccgctgctgttcctgctgctcaagatctgggggagcagtggtcttattaatggatgtgcttcaattcaaatagtctcgcactagtcatcattccctttgtttctgttgcttgcttggttgttcttcttcttcttgttgatcgtcgtggtcgttgaggtcttcaattttttttttattattattccgttttcgctgtttttagttttgtcctggatgcaatgcagga

SEQ ID NO: 22604 - DNA, 135 bp, Glycine max
  Clone ID: 701103324H1
attctctctgtgtatttccctacctctcccttcaagatgcagatcttcgtcaagaccctcaccggcaagaccatcacccttgaggtggaaagctctgacaccatcgaccacgtcaaggccaagatccaggacaag

SEQ ID NO: 22605 - DNA, 252 bp, Glycine max
  Clone ID: 701103326H1
tcgaggacctgtggaagcgcgcgaagaccttcgccgaagaggccgcgaagaaatcccaatccctgaccccttcctcctcccggatcgccgatctcgtctccgaaaccgccaagaaatcgaaggagctcgccgccgaagcctccaagaaggccgacatcctcaaatccgccgcgcttcgccaggcagaccagatcaagtccttctccgacacaatcgcaattcctccccaattcgccgccattgcctccgccg

SEQ ID NO: 22606 - DNA, 260 bp, Glycine max
  Clone ID: 701103327H1
gtctcggacctcgccgtcgcgtttgacctggcctcaaagctctccgccgaacgcgccatgaacgcgtcgccgtttatttggaaactaaaacgactcctcaacataggatccgagaagaaactgagagaaacaattaacgtagcaaacgacgtcgcaaaagagatgataaagcagagaagagaaatggggttcaagacgcggaacgaccttctctcgcggttcatgggatcaatagacgacgacgtttatttaagagacat

SEQ ID NO: 22607 - DNA, 258 bp, Glycine max
  Clone ID: 701103328H1
cttcatcacgcttctgcttctttcatttcgctcttagtttccttttcatactcaccgcctcaccaatacatagttttaacttccttttattgagaaaaagaaaagtctagagtacaattcaatggtatggatgacaccatggagaagagcaccaccatcttagccattgctgcttcccagaggtactccttgaagatctccttcaatttccttttcgggtttatttcaataaattaaggattaatatttgtgaaaaag

SEQ ID NO: 22608 - DNA, 256 bp, Glycine max
  Clone ID: 701103329H1
caaaacctcaagtaccttctccttcacattccctcagcactttctgtattcaaaacttttggcattgtttccaatatcctaacttgagactatatatatagcagcatatatatatatataatggatagggtgacacagatggcatcagagaggccagtggtgatattcagcagaagttcatgctgcatgtgccacaccatcaaaaccctcttcagtgacttcggagtgcatccaaatgttcatgaacttgatgaga

SEQ ID NO: 22609 - DNA, 260 bp, Glycine max
  Clone ID: 701103331H1
gttgtaactcgttcttcttcttttgttgttctgtgtttgtgtttgttttttctctcacctgaaaatgtcttgctgcggtggtaactgtggttgcggaagctcctgcaagtgcggcaacggctgcggaggctgcaagatgtacccagacttgagctacactgagtcaaccaccaccgagaccttggtcatgggagtggcacctgttaaggctcaatttgagggtgctgaaatgggtgtgcccgctgagaacgatggctgca

SEQ ID NO: 22610 - DNA, 128 bp, Glycine max
  Clone ID: 701103334H1
cagctatcatgtttgacctatggggtgtctcatgcctggaatatttggaatctattccgtggaccgaggatgaacaggaggaagtcatgtctcagctagaacatctgcagattgatgactctgcaact

SEQ ID NO: 22611 - DNA, 130 bp, Glycine max
  Clone ID: 701103335H1
atcattctcatattattgtcgccacttcgacctcaatcaccctcgcgccctcgctcttcccttcctggtggcgacaatgtcgactcctgctaggaagaggctgatgagagacttcaagaggctgccacaa

SEQ ID NO: 22612 - DNA, 258 bp, Glycine max
  Clone ID: 701103337H1
gctttgctttgcgcaccgtttcgtttcgtttcgtttcactatttttttcagatatttagacgaaaacaagaatccgcattctgattctgaagattcatgtctaatctcatttctttcttcccttggttggagctcgttttttaggagctcagcagttgatggactgttaccccaagagcagtgacaagaaaacattaaagaggtggttttttattgataaaagagttgggtgaagtggaaatctgataaatattattt

SEQ ID NO: 22613 - DNA, 128 bp, Glycine max
  Clone ID: 701103338H1
ccctagtctccatacatcaacttgggaggttaaagagacggcaacgttgtgctgtccgccttgaccgagccacagcttcgtcttggccctcggttttgccctgtaaaactaatcgcagtcacaacaga

SEQ ID NO: 22614 - DNA, 262 bp, Glycine max
  Clone ID: 701103339H1
gatgaaaccaaaaggaagttcctagattggccaaagcgtttcaacattattaatggcattgctcgaggacttctatatcttcatcaagactctaggctgaggattattcacagagatctaaaaacaagcaatgttttactagatgcaaatttgcatcccaaaatatcagactttggcttggctcgatcatttataggagatcaagttgaggcaaacacaaatagggtggctggaacatatggttacatacctcccgagtatg

SEQ ID NO: 22615 - DNA, 249 bp, Glycine max
  Clone ID: 701103340H1
ctctctttcaccaatcaacacaaactaagttcttccttctgttgacaagcgatagccatggccacgaatccaatcgaagcggggaacggcgacgctgctcccgaccctaacgcgactaccaggtcctccgtgtagctgcaagactcggatgagctgaagcgagtcttcagccgattcgacgccaacggcgacggcaagatctccgtctcggagttggacaacgtcctccgctccctcggatccggcgta

SEQ ID NO: 22616 - DNA, 131 bp, Glycine max
  Clone ID: 701103341H1
cagcgcgagtggatctggacgggaaccccatgaaggcacttacgatctgcatgatcggcgctggcggcttcataggctcgcatctctgcgagaagctcatgtccgaaacccctcacaccgtcctcgccctc

SEQ ID NO: 22617 - DNA, 127 bp, Glycine max
  Clone ID: 701103342H1
cacaagttaacgtggaagaagagtctactagtgacttggaggaggaactgaagcgggtgactgcagaaaacaagaagttggccgaaatgctctcagtggtgtgtgagaactacaacactttgagaaa

SEQ ID NO: 22618 - DNA, 258 bp, Glycine max
  Clone ID: 701103343H1
caaattaatatccaacactctcaagctttccactttcaaactctgcccgctcaatttgctttatctttccgagatttatatacacttttattgaaactgttgggattcaagtctgaaacaaaatcttaagaagtttgcggcagctgatgccatcatcttttagtatggattcgcaacagctcttcagtttcgaattaccttacatgtcatctttacccaccgttccatcgcttcttggatccttgaaatatgacacag

SEQ ID NO: 22619 - DNA, 182 bp, Glycine max
  Clone ID: 701103344H1
atggatttctctaaatttggtggaatgggtgatgcaatggatgacattgatgagagtgatgatgaagagcaagaagtgtcaaagcctcttgaacaggatgctggcgaggcatcaacagagaaaaaagaggctgctccaagcacatgatgccgttgcagttcaaggcgctaccctagaagatg

SEQ ID NO: 22620 - DNA, 134 bp, Glycine max
  Clone ID: 701103346H1
ctcgagccggtttctcatggcggttccaacatcggaaagcgaatccgtagagaacagaacactcctttcacagttttactctcactatctcgtaaaccgaatcaagactctctatccctacttctccacaaatt

SEQ ID NO: 22621 - DNA, 254 bp, Glycine max
  Clone ID: 701103347H1
tgttaattttctgacttaccctcttcacatttgtgtgcaatgttagaggacattgaatcatctactactcggctttgtaaaatgggattcggtcgaaattcgacctcaagaagcggagattacttggacggaatgcttaacgactatgttcgaggaaggagcaacctgaaggctcagaagagcgccgccacaacaacgaagtttgtggcagtgctcacgtgccttcagtttttctttgcagtctatgcaacatt

SEQ ID NO: 22622 - DNA, 182 bp, Glycine max
  Clone ID: 701103349H1
cgattgctagaatggaatttcgatgctcagtcatctcttttaccattctcttctctcttgctcttgcaggagagagccatgtccatgcatcgctacctgaggaagattattgggaagctgtttggccaaacactcccattcccactgcactgcgagagcttctaaagcctctccctgcaggt

SEQ ID NO: 22623 - DNA, 253 bp, Glycine max
  Clone ID: 701103350H1
cgcaaacaaaacaccctttccttcttcttcttcttcttcttcgttccgatcagattcttcgaattctgaatcaaaattcatcgaagaagaaggagaaggagatgtatagcaatttcaaagagcaagcaatagagtacgtgaaacaagcggtagatgaagacaataagggagactacgcgaaagccgttcacctttacatgaacgcgttggagtatttcaaaacgcacctcaagtacgagacgaaccctaagat

SEQ ID NO: 22624 - DNA, 257 bp, Glycine max
  Clone ID: 701103352H1
cctattgatacggagagcagaaagatacttagttgttggtgctgtccggttcattcgaactattctctctcgccatgatgaacatctgataaattattttgttaggaataatgttctgaagccaattattgatgcatttgtctctaatggcaatcgctacaatctgctccattctgctgttctggaactttttgagtttattcagaaggagaatctgaaattattgctgaaatacatagtcggttctttttgggacc

SEQ ID NO: 22625 - DNA, 260 bp, Glycine max
  Clone ID: 701103353H1
cctcgagccgattcggctcgaggccttttcagggaaggaccctaccccggttgacagaagtgacccctatattgtaaggcagactgcaaagagtgtcgtggcaaatggccttgctagaaggtgcattgtgcaagtttcctatgccattggtgtccctgagcccttgtcagtgtttgtggacacttatggaactgggaagattcctgacaaggagattctgcaaattgtgaaggagaatttcgacttcagacctggaatga

SEQ ID NO: 22626 - DNA, 90 bp, Glycine max
  Clone ID: 701103354H1
ggttgtcgtgatccatcacaacactttgtcactgagattcagagaaatggcgtcagcaatgtgtcgcaggggcatcatcacccactactc

SEQ ID NO: 22627 - DNA, 265 bp, Glycine max
  Clone ID: 701103316H1
gcctcgagccgaatcggctcgagattgcacatatatcagtactcattctcttccctctcctctcactacttgtcatcaaaggctaaaactcacatccactaccgtgcactgttattcataaaaaagattatatttacacaacaatatataatggccagatttctacacatgcttataatgctctctagccttgctctaattatctcagttttgccattggcctccgcatctttgaaggtggacttctataaaactacgtgcccat

SEQ ID NO: 22628 - DNA, 258 bp, Glycine max
  Clone ID: 701103355H1
ctactcatcattgtctcaaaaaccttctctctcaacaaaacctacaacaacaacaaaaaaagagaaattttttagaacaatggaggcatcaaagatgaagtttttcttggttttggtgattgccatgttggcgatggtagcaactggggtttcagctgctgaggcacctgccccaggtccttcatacgatgccaccaccttctttgtacccactgctcttgcttctctctttgttcttgcatttggccttctcttcta

SEQ ID NO: 22629 - DNA, 75 bp, Glycine max
  Clone ID: 701103356H1
tgaacatggaagcaactgagatcatattccttttgttttttggtccaaagagaagatatatggaatagcattagc

SEQ ID NO: 22630 - DNA, 151 bp, Glycine max
  Clone ID: 701103357H1
cttgttcattcataccccttatcaaatctccacacatatatattacatccaccgatctctctgtcattctccctcgcgttctcattgtctctagacgaagcgttcgcaaaaacaagttcgttgatttcgttggtgagtatcaccttgatct

SEQ ID NO: 22631 - DNA, 266 bp, Glycine max
  Clone ID: 701103282H1
atctactctctattttcctagcttagattccttctccaatggctcttgccgtttccactacttcttcctcttcagctgcagcagcagcagcagcgtcgagctctttcttctcgcgccttggatcttcatcggacgctaaagctccgcaaattggttcctttcggtttccggagaggcctcaagtttcgtctggtgttgttaatttaactcaaagacgctcctcggtgaggccactcaatgccgaaccgcaacggaatgattctgtt

SEQ ID NO: 22632 - DNA, 201 bp, Glycine max
  Clone ID: 701103283H1
gtagggagaaaaaggaataggagatggcacagttagttatggaatggatgatggtgatgaccatttacatgcgctcttggactggaaccattattggtccctataatactgtacatgaaggcagaatttatcaattgacgctgttttgtgatccagactaccctgaaaagcccccgagcgtccggcttcattcacggatca

SEQ ID NO: 22633 - DNA, 258 bp, Glycine max
  Clone ID: 701103286H1
gtcttttctacccttcccggatcccaatccctaatctttctaccactctcactccaaaaatctctaattttttcatctgggaagatcggttgacgaatcgaggatccgatcgcttgcgaggaactagggtttcaatcgatcgcatcacacacaaacaatcatgtttagccggatgttcggtaaacctaaacaggaaaccaatgctgttgccactttggacaagctaaacgagacacttgaaatgctggagcacaaagg

SEQ ID NO: 22634 - DNA, 266 bp, Glycine max
  Clone ID: 701103287H1
cttgttcttcttgttgttttttttcttccctctcttctctttgtttgtcttctccttcggttgaatcaatgggtgcagaggttaagatctggaatcccgttgaagtcgctgagcaagctcgccatgactacgcttcgcagattcatccctcacatctcaccattgatccctccctcgagcttcctcaaatgacacctctcgtcctaaagttgtgcaaggatatgttcaaggcgtggtcgaatttggatgattcttgctttgttgtt

SEQ ID NO: 22635 - DNA, 151 bp, Glycine max
  Clone ID: 701103288H1
cttctttgttcctaaacacggggcactggtttcgaaccctcgttgtggttaggtctacttcacctttcgcattttggaatccatgggtcagggaactccgggcgggatgaaccggcacggtgactggtagccggacgggggtgcccagtta

SEQ ID NO: 22636 - DNA, 159 bp, Glycine max
  Clone ID: 701103289H1
gcatcatctccaaaatcccaaactcatatcataacgggatcggaggctaatctattacgcgctgttctctcgtcttctacaagattttctgttcgatctcaaccaaggttgttccttcaacctccgccatgagtttcatctttggaaagcgaaaaaccc

SEQ ID NO: 22637 - DNA, 260 bp, Glycine max
  Clone ID: 701103290H1
cttctctgcaaatgcttcattccaagatggttaggactctgtaggctgataaagacaacactcataccgttggaaagaaggatgctgctggccatgttgcttaatttagttcttgcttcctttgtcttcttgagttttatcagagacgggagtgcagggatcactagctctttcattcggtcagagtggccggcagttgacatcccccttgatcatgaagcatttgcagttccaaggggttataatgccccccaaccaag

SEQ ID NO: 22638 - DNA, 262 bp, Glycine max
  Clone ID: 701103291H1
ttttctttcttttgtgtttcttgctttcttcttcttcgctttcgtcccttttcggagtatccctcccaaccatggacgttgatccttgccaatacgaacaaattgctataaatgaaaaagatgtcaacaacatcattctgtcataccttatacataattgctacaaagagtcatcagagtcattcatttcttgcactgggatgaagcagcctgcagatcatttggagaacatggaaaaaagaaaaagtagtaaggcctcctt

SEQ ID NO: 22639 - DNA, 171 bp, Glycine max
  Clone ID: 701103292H1
atgaaatttcaccgtaccagagaacaaggaaggatagaagaaagtgaaagaaaatggcgttgtacatggacgaagaagagatttggaagtgtccgaagcatccaatccaattgaattctccagagagaagaagaaacttaatcgatcatcacttcacttcactactacatc

SEQ ID NO: 22640 - DNA, 262 bp, Glycine max
  Clone ID: 701103293H1
ctggcaaagacgagttcagagacagagatattctctatcaccacaccgttgagcaaagtggctggcaaggtgaacttcaactctttgatgctggcgatgaggagcatgctttccagctcttcaagcctgagactcatcttgctaaagccatgatcaaacgcttggcttcttttctggtttgatggatggcttgtcatgagagattccaaacaagttaaatcgtgcgtgccttcacctgtcttgtctactactccagttttag

SEQ ID NO: 22641 - DNA, 154 bp, Glycine max
  Clone ID: 701103295H1
ctctctccaaaacccaactttctctctcaagatccatcaaatctcgatcctcccctctccctgcaagatccggtggtggttccgattgctcacatagggtttggtctcgggtcggtcaaggctggcgggtatttgggtgaagtaaatggcggat

SEQ ID NO: 22642 - DNA, 263 bp, Glycine max
  Clone ID: 701103296H1
gtagaaatgggtgtctctgcagattagacattagagtgtgaactccaaactctgaaaccctcaactcaaatccaatcctttggtgggtttcgaattggagtccaaccaaattctaaacacatggactcagctctgtcgcggttgcatctccacaatctccctcctctttcctccgccgctcaccgccctctcttgcagcctctcgccgtcgccgcttctttctaccgctcttctcctcctctcccacgcctccgtctctcgcc

SEQ ID NO: 22643 - DNA, 267 bp, Glycine max
  Clone ID: 701103302H1
attctgtccattctagattgtcatatatagagaagcagaattagaaagaagggtagctaggagactttctgaattgaagccttttttttcattgagtgattgagagcatggagaacatgaagatgaacaaagatgaaaggtttgcacaaaagggtgtcccaatacatagccaggttatgaagatcaggcaagagtcagagaaaattgttgattggtccccgggcaagccagagataagacccgttctccgtgaaataagccggcaga

SEQ ID NO: 22644 - DNA, 265 bp, Glycine max
  Clone ID: 701103303H1
cgttatttcaactccagctattaaagggacaatcctacctggcattactcgcaaaagtataattgatgttgctcgaagccaagggttccaggttgaggagcgattagtgtcagtggatgaattgctagatgctgacgaggtcttctgcacgggaacagctgtggttgtatcacctgttggcagtattacttatcttgacaagagggtagcatatggggatggtattggcgtggttgcacagcaactttatactgtccttaccaga

SEQ ID NO: 22645 - DNA, 264 bp, Glycine max
  Clone ID: 701103304H1
ggaagatatagaataaacagcattctggacacacaaggggcattatgaattccttgttataccctttggcttgaccaatgccagcctcacctttttatgaatgatgtggtaaaaccatttttaggtgtgtgcttgtcttgtctaaatgaaggctcatgagtgctttatgtctaacaaatgtaatatatggattcagtggaactttaacagaaccagttgagaaaacaggtgatcaaattaaagaaatggaactgaaggttcatc

SEQ ID NO: 22646 - DNA, 265 bp, Glycine max
  Clone ID: 701103306H1
ggaaaatatctatatatccatgtaggtactccacttgaaatcgagttcgcagagaaaccttattgtgctgaatcctccaaatgggtggcgtttgtggacaatgaaatccaaaaggcatgtgtgggtattggtggtcctgaaggtcatcctggtcaacaaacatttagtggcacatttagcattcagaaatataaatttggatacaaacttgtgttctgtatcactggctcaggcacttgtttagatattggaaggtttgatgcca

SEQ ID NO: 22647 - DNA, 264 bp, Glycine max
  Clone ID: 701103307H1
cggtgcagaagcaaatggcggcgagaagcaattgaaatttctgatctacggtcgcagcggttggattggtggtctactgggtaagctctgcgaagagcgcgggatccaacgtcgtcggcactctcaccctcgccgacgtctgccatcataaaggcctcatcctcatcaactacgccaccggctgcatcttcgagtacgattcttcccacactctcggatccggcatcgccatccaggaacacgacactcccaatttcaccggat

SEQ ID NO: 22648 - DNA, 264 bp, Glycine max
  Clone ID: 701103308H1
gcttcattatctcctcttggtgaagcatgctcaagaaaggacttgactgccatacatgaagttctggaaagtcttggctataaagatgatgaaggagtggcgaatgagttatcatttcagatgtggactgatcaaatgcaggacacattaaattgcaagaaaaagggagatgttgcatttcggcagaaagattttagactggcaattgagtgctactcgcagttcatagatactggaacaatggtttctccaacagtctatgca

SEQ ID NO: 22649 - DNA, 197 bp, Glycine max
  Clone ID: 701103309H1
cttgcacttctacaagaatcccgtgaacatagtggagggtaagaagcagtacctgtttgacgagaaggggagaaggtacgtggatgcgtttggagggattgctacggtgtgctgcgggcactgtcaccctgatgtggtcgaagccatagtcaaccaaaccaaaaagttgcagcactccacagttctctaccttaaca

SEQ ID NO: 22650 - DNA, 264 bp, Glycine max
  Clone ID: 701103310H1
atcgttttagttaatttcaaaatgaagaaacgatggagtgcatgaatcttagaataatgattagcgattctgtgggattgttaggggaaaaaggtgaagaatcgaatcggtacgaacgtgattcttagctggagcgcgatgggggaagattattgtgaagatttgtctcgatcgaccagaaaagcccgtttactttttataaaaaaaaaaaaaaaaaacttttaaaagggggctgctgtttcatattcacctcgtgtagaatta

SEQ ID NO: 22651 - DNA, 261 bp, Glycine max
  Clone ID: 701103311H1
gactgagatctcgtctccctcttacttttcttatttatttccatgtatcttcaatagcctttttttttttatagacaaagttgggattttgatttcattttcttgcacccaattggattttgatctgaacccagttaatcattaagtcactgtattgtgagtaagctgtttgtcgttgtttcaaatttgaagtactggagctgctacattaggtgggcttttgagtggtgaatttgacgttgaatgtccggtgaaacgaga

SEQ ID NO: 22652 - DNA, 264 bp, Glycine max
  Clone ID: 701103312H1
tctcgagccgattcggctcgagtatttatccatttagaaagacatacctggttacccatagactcatagtgtcatactgcaacacaaaacaatgggttcccttatggcaggatgggactctacccacatagatcctcaatcagccacacttaaaaggaaccgctcactcaccaaggatgaaattgatgcttactggaaatcaaagaagaagatagaggaagaacaccttagagctatttccaacttgtcagagactattcaggc

SEQ ID NO: 22653 - DNA, 263 bp, Glycine max
  Clone ID: 701103313H1
caatccccacttcgccctctctctctcactctcaccatggcgaacctctcatactttctcttccttctctttctcttcgcaacccacgcacgttccgacctccccggtacgtgggagcttctcgtcccggacgccggcatcgcttccatgcacacggcggtgacacgcttcaacacggtggtcctcctcgaccgaaccaacataggcccatcccgaaaactcctcccgaaaggccactgccgctccgacaaacacgacgccgt

SEQ ID NO: 22654 - DNA, 265 bp, Glycine max
  Clone ID: 701103314H1
cggctcgagaaaaaataaattattttgaaaccctaggttggagatggtggtgggaggaacagcagatttcttctacaaagaagctcaacggttagggtatgtggctcgctccgccttcaagctccttcagatacagaaccagcacaagattatcagccctggctcctccattctcgacctcggctgcgcccccggcgggtggctccaggtggcttgccagagcttgggtcccttccgcggcggcggctccgtcctcggcgtcgaa

SEQ ID NO: 22655 - DNA, 264 bp, Glycine max
  Clone ID: 701103315H1
gcaaaggagtgatttggagtttggagcgactgaactaatcattaatttgcactcgctgtttcagcttcatcacccttcttttgcatcatttatatctcttgagaaatggcacaagaaacctttctattcacatctgaatctgtaaacgagggtcaccccgacatgctgttcgaccagatctctgatgcagtacttgatgcgtgccttgaacaggaccctgacagcaaggttgcctgtgagacatgcaccaagaccaacatggtc

SEQ ID NO: 22656 - DNA, 264 bp, Glycine max
  Clone ID: 701103281H1
ctaaaatctgcacttgtctgctccaatcagtttctatttttattttgtttcttcgagaatgtgattgtttggggggaaaacggaaaagaagagaagcacgatggagtgggtgaagatgaaggagtacgcgagagagttcatggttggagtggcggagatgacggtggagttcggaaaaggttgcagagacatagtcaaacagagtctggtcaacgacgactcctacatcgtcaaaaacttcggaagagactcctacattggaaa

SEQ ID NO: 22657 - DNA, 178 bp, Glycine max
  Clone ID: 701103241H1
gtggagatgccgacgctgataaatgggccacgcacaaattggccactatattggcattgatgcgccttcgtctgggatagaacaaatgcgagaaacttgggagactcacaggaaatcctacactgccgagttctttgagcttgaccctttgcacggagactcatagccacgcatttgg

SEQ ID NO: 22658 - DNA, 176 bp, Glycine max
  Clone ID: 701103242H1
ctcgagccgcaatatattccattctctctgtgtatttccctacctctcccttcaagatgcagatcttcgtcaagaccctcaccggcaagaccatcacccttgaggtggaaagctctgacaccatcgacaacgtcaaggcaacgatccaggacaaggaaggcatccccccggcacca

SEQ ID NO: 22659 - DNA, 144 bp, Glycine max
  Clone ID: 701103243H1
gtgctctcttccctcctccacttcatccaaatctttctcattttctctcccaaatcacactctcaattacaataacacacactcaacttgagaattttccccaaaaatcccaagagctcgcgccatggtttccccggaaaacag

SEQ ID NO: 22660 - DNA, 206 bp, Glycine max
  Clone ID: 701103245H1
agagaggaaggaaaaatggagttgttcttctacgcggtgttcggcggtttgggagcggttgttgcaatgacggagatgagcaacagcaacaaggaccgaatcaacacctcttccgcattcaattccttcaagaacaactacctcatcgtctattccctcatgatggctggagattggctacaaggtccatatgtctactaccttta

SEQ ID NO: 22661 - DNA, 98 bp, Glycine max
  Clone ID: 701103247H1
ctcgagccggttggtgttagtcttggtgtagtgtagctagggagggatatatatctgagtaagatggaatcagagcttgaattgcccccaggcttcag

SEQ ID NO: 22662 - DNA, 133 bp, Glycine max
  Clone ID: 701103248H1
ctcgagccgtggcgatcggatccagctacagcatagagatcaaggaaggaaggaaggacgatgttgggtgttataaggcacaagagtattcgccatgccttctccgcaatcagacacttgtcttcggcagcta

SEQ ID NO: 22663 - DNA, 96 bp, Glycine max
  Clone ID: 701103249H1
gaatcgcttgggccttcggtggcatgatcttcgccctcgtttactgcaccgctggcatctcagggggacacataaaccaggcggtgacatttgggc

SEQ ID NO: 22664 - DNA, 248 bp, Glycine max
  Clone ID: 701103250H1
gtcgagccgctcgcttttctgcaaaatcatctaaatccgcttctgatcctgaatcatcagtttttcccttgaaagatgggaggtggcaaggacaaacacaatgaagaagagcaaggagttttctcacatctggctcatggagtagctcaagctgctcatggttaccctccaggggcataccctccacctcctggggcataccctccttaccaagggctaccacctgctcatggctaccctccacaagg

SEQ ID NO: 22665 - DNA, 174 bp, Glycine max
  Clone ID: 701103251H1
atgagttggtgaaggtagtggtgcaagtgttgaacctcttgcttctgagactgctggctccactgctgtggttgccattttgactcaaacacacataatagttgcaaattgtggagattcaagacgtgtcttgtgtcgcggaaaaccagcactgccattgtctgatgaccacac

SEQ ID NO: 22666 - DNA, 99 bp, Glycine max
  Clone ID: 701103252H1
gtctttttctctctctacactctattcaacccttcacattttctctcttctctatcttaaattacttttccatggaggaaagcaagaaacgagtccggg

SEQ ID NO: 22667 - DNA, 149 bp, Glycine max
  Clone ID: 701103253H1
ctagcttgttaagctttttggcatggttttgttcatatatatttctcctcatatcgtgattctaccattttcaatattaagctactaccgcttgcaaacatcctgcggactaaagtgccgaaatgtatggtggcaccgtggcactactt

SEQ ID NO: 22668 - DNA, 215 bp, Glycine max
  Clone ID: 701103254H1
cgaaatttcttagacaaaaaacaaggatcagaaccgttgaatcaagttgaggaagatggcactagtctctggaggacgatcaacactgaaccctaacgcccctctttacattcctgccgcgtttcgccaagtggaggatttctctccggaatggtggcagctcgtgacgacactgacatggtaccctgcctactggctacgccagcagcacgatg

SEQ ID NO: 22669 - DNA, 258 bp, Glycine max
  Clone ID: 701103256H1
ctgatggcagaattgcatggcaaactaacactgccaacaagggtgacgtggccttcaggcttctctcaaatggtaacatggtccttcttgatgcacaaggcgggttcgtttggcagagttttgatcaccccacagatacccttttggttggtcaatatcttagagcaaaagggccatccaagttggttagtacgctctcagagaaggaaaatgttgatgggccttatagtttggtcttggagctaacaggttagcttg

SEQ ID NO: 22670 - DNA, 156 bp, Glycine max
  Clone ID: 701103258H1
ctagctattagctatagctagaagtacatccactccctctctgtcattgtgcttttctagttacttccaaaataacaccagaagtagagacaatgcgttgccaagcatggcccgaccccatcgttcgagtccaatccttagctgaaagtggcctaa

SEQ ID NO: 22671 - DNA, 235 bp, Glycine max
  Clone ID: 701103260H1
ttggtcccaggtgggcagctggaggattcgagagttctcaagggagtcatgatacacaaagatgtggttgcacctggcaaaatgaggagaaggattgttaacccacacatcattcttcttgattctccccttgagtataaaaagggtgaaaaccacacaaatgccgaactggtccaaaagcaactcgggactctcttcttgaagatggaagaagaatatattgaggagctatgca

SEQ ID NO: 22672 - DNA, 203 bp, Glycine max
  Clone ID: 701103261H1
gaggtgatgttccctggtggtcatggtcttatggtccgtgcttacttgcctgttataaataccctatccaagggacttgctattctcttggggcacagggtcacaaaagtagttaggcgatataatggagtaaaggtaacagtggaaagtgggaaaacgttttttgctgatgctgctgttattgctgtcccacttggggtgct

SEQ ID NO: 22673 - DNA, 262 bp, Glycine max
  Clone ID: 701103262H1
gttctttgtctcgcaatcttcactattttcaccgagcatttgcattccacattgaatatggctgaggctacacaatctaatgctgagttattggagtggcctaagaaagataagcgccgcttcctgcatgttgtgtatcgtgttggtgatcttgatcgcaccattaagttttatactgaatgttttgggatgaagcttttgaggaaaagagatattccagaagagaaatatgccaatgcttttcttggatttggccctgaac

SEQ ID NO: 22674 - DNA, 214 bp, Glycine max
  Clone ID: 701103263H1
gcgtattgctgatgccagtattgatgaatgatgattaaagataagtgtaattgtatgatgaaaattgctcctagttgggttggcatgatgtataaaataagctagaagttgttgtaaatcacataagtatattatggccttaatcgccggtaccccacccatcctaccgctcatatatggatagtccatagtcacatattgtattgtattaaaa

SEQ ID NO: 22675 - DNA, 268 bp, Glycine max
  Clone ID: 701103264H1
tttttcacaaactgtggaaagattcgattttactgctgggatactgctggacaggagaaatttggtggcctcagagatggatactatatccatggacaatgtgctattatcatgtttgatgttactgcccggctaacatacaaaaatgttcccacctggcaccgtgatctttgcagggtctgtgcgaacatcccaattgttcctttgcggtaacaggttgatgtcacagaccaggccagttaaggcaaagcaggttacattccacagg

SEQ ID NO: 22676 - DNA, 261 bp, Glycine max
  Clone ID: 701103266H1
cttctctcaacgtttgctcaccccaactcttcttccagtctccatcaccatctccatcaaatttaactatggctactgaagaggttttggttgatgaaatcacttacccttccaagatcactactaccaagcccctatctttgcttggccatggaatcaccgacatggagatccactttatccatgtgaaattctattcaatcgggatttatttggagcctgaagtagttggccacttggagcagttcaaaggaatatctg

SEQ ID NO: 22677 - DNA, 264 bp, Glycine max
  Clone ID: 701103267H1
ctctgtgcttagttaacgttaacagtgacttacgctggcggcttctgcagatgttccccacgatgttgtgtccctcctctcttctcctcaaagggaccttcttcttcgaaacaacggcgatcaggttaaaattgacagcttgaagggtaagaaacttgcgtttgtacttttcggcatcctcgtgtggtccatgtcaaacatttacgacaactttcgtggatgtctacaatgaggttgcaaaaaccgtgacttccagatcgtttt

SEQ ID NO: 22678 - DNA, 248 bp, Glycine max
  Clone ID: 701103270H1
gctcgagcggctcgagcggctcgagaaactaaccactctgtttctcttgctctacttttaccctgtttccagtggaacaaatcttcatccaaattaggttttgttttggagaaatgtatgcagagactggtcttttcttcccatatttgcacaacgtctctcacggccttcatcagcttgaggagtactgcaaaacccagaagtccaatgcttcaatggatgacttgttcagtcttctgccatgtcag

SEQ ID NO: 22679 - DNA, 129 bp, Glycine max
  Clone ID: 701103271H1
cgtcgagccgcatcggctcgagcggctcgagatatttctctccatctatctcttcacactctgagtttcatccatttgcattgactgacaacgactaactctgaaaaccgcaaccaactcacacacact

SEQ ID NO: 22680 - DNA, 248 bp, Glycine max
  Clone ID: 701103272H1
ctgaaccttggctgattacaacatccaaaaagaatctaccctccacttggtgctccatctgcgcggtggtatgcaaatctttgtgaagacccttactgggaagaccattactttcgaggtagagagctcagacacaattgacaatgtgaaggcacagatccaagacaaggagggtattcctccagaccagcaaaggttgatttttgctggacagcagcttgaagatggacgtccactggcatactaca

SEQ ID NO: 22681 - DNA, 264 bp, Glycine max
  Clone ID: 701103240H1
cttacatgttcgggagcatatcgccggtgataaagagcagcatgggtttcaaccagaagcaggtggcgttcttgagcgtggctaaggatttgggtgacaacgttggtcttcttgctggaaaaatcagccaggcttcccctgtttgggggcttatacttgtcggggtcgtgcagaatgttgttggctatggccttgtttggctcgtcgtcactcacccgctcgccgctttgcctttgtggttgctcatgcattgtaatccttgtg

SEQ ID NO: 22682 - DNA, 127 bp, Glycine max
  Clone ID: 701103273H1
caagaaactcctaattgtcaattgttgtaaagaaaagaactgaaaacactgacactgttattctctgaattttctcaccatctacaactgaagttttaaccaatatggaaactgaaaagtctaatgt

SEQ ID NO: 22683 - DNA, 241 bp, Glycine max
  Clone ID: 701103274H1
ttccttttgaaggttagaagtgctacaatacaaacaatggcagctactcaggaagatgtgaagcttttgggtattgtgggaagcccatttgtgtgcagggtccagattgcccttaagttgaagggagttgaatacaaatttttggaagaaaatttgggcaacaagagctgattgcttctcaaatacaaccctgttcacaagcaggttccagtgtttgttcacaatgagcagcccatagcag

SEQ ID NO: 22684 - DNA, 118 bp, Glycine max
  Clone ID: 701103276H1
gtcatcaccaattccatttcgatttttggctcagccaaccatcacaaatagacactcgatgacgcgaaacaagcaaagtacgaacccagatacgggaacaaggttgttatctctgtta

SEQ ID NO: 22685 - DNA, 141 bp, Glycine max
  Clone ID: 701103277H1
tttaatatttgagtgtgatcgatggcatacccaaacccttatccggctcagccctatccctccgcctccgcgccgctgccggcggttccctccgccgtgatcggccccaagttctgcgcgccgtacccggtggatctggcg

SEQ ID NO: 22686 - DNA, 205 bp, Glycine max
  Clone ID: 701103278H1
ttcatcggttggccaggttcgatgccggacgatcgcgttctggagaaaagcgcgttgttccagagagcgagcagacggaacttaaaggacgtttggctcgctcgacattcaggccatccgcttatggcatgggttctagctgcgtacacgcacgcgaatctgccgtggacccagcacgcgtttcatgagaagcttgcagagattc

SEQ ID NO: 22687 - DNA, 96 bp, Glycine max
  Clone ID: 701103279H1
ctgctcgagaagtctttctgcttcaaaatagacttatttaaggatatttgttgaacaacttgtgtcctgttgagttattgctgtttgaatttcatg

SEQ ID NO: 22688 - DNA, 227 bp, Glycine max
  Clone ID: 701103280H1
cttagatcaccatgactatctcattccttatttgaggaaaataaatgtacataccacaaagacttatgctacaagaaccatatttttcttgaaagatgatggaactttgacaccattggccattggagttaagtaagccacatcctcagggtgaagaatatggtcctgttagcgaagtctacgtgcctgccagcgaaggagctggaagcttatatttggttactggc

SEQ ID NO: 22689 - DNA, 272 bp, Glycine max
  Clone ID: 701103205H1
gcagctagctactagcatcttcttccatcaccacattcatcttaattaatattctctagtggtgcttcccaatcaatatcctttaattttgtctcaattcctttctttctcattcaccaatccatacttcattttgttaatttcttaatccaacaccaccaagatgccaactgacacatcatcagtttccggcggcgaaatcgtgtgtgtgaccggtgccggcggtttcatagcctcttggcttgtcaaacatctcttagagaaaggctaca

SEQ ID NO: 22690 - DNA, 270 bp, Glycine max
  Clone ID: 701103206H1
cgatcatacacttagttgcttccaattaagatggttctgctagagaagctctgggatgatgttgtggctggccctcaacctgagcgtggccttggcaagctcagaaaactcaccaccctcaaaactattgatgaaggagaaagtagcaagctgcagaagacgttgtcgatgccgtcgacaccaacaaccccgatgactccgacgactccaacgacaccgggatcggcccgtaaagctgacaacgtttggaggagcgtcttccatcctggg

SEQ ID NO: 22691 - DNA, 272 bp, Glycine max
  Clone ID: 701103207H1
agagaatgtggtggcggcggcgcccgagaccatgagaactacagcaccttccgatttcattttcacccaaaagcttcaccctttcaacatcacctccaccaaaacctccctccaacgaaccctaccctattttctccaactcaatcgcatggccgaggctgcacgaaccgcgcataaacccgcgccgcacccgatccaacccaaacccgacgataaaaccccgaatccggcgaaggagattccgccgccgccggagaagccggagcccggcg

SEQ ID NO: 22692 - DNA, 270 bp, Glycine max
  Clone ID: 701103208H1
cgttgtttcaattattctattcgcacaccccctgaaagagaatctctcctttctataaacccataatttagggcgcgctttttcccggcctcccttcgccaccgtatctccatccatctccgccaccgtcgccacctctctctctctctcacagttcgtatttatacatcttctctggtcttagcaatgagcttctcaacatgcgccgagatatcgcgttgtttcgccgcagcaacggcagcagcttcagcgaaacctaattccgggaag

SEQ ID NO: 22693 - DNA, 136 bp, Glycine max
  Clone ID: 701103209H1
gttatgttctcaaggagcccatcggagttgttgcattaattactccatggaactatcctctattgatggctacatggaaagttgctcctgctctagctgctggttgtacagcaatattgaagccatctgaattggc

SEQ ID NO: 22694 - DNA, 90 bp, Glycine max
  Clone ID: 701103210H1
ggcagaccacccaccctggagcaggtcttcaacagagagacagagaaggaagaacacacacacacacactcaccggttcaactagcattt

SEQ ID NO: 22695 - DNA, 208 bp, Glycine max
  Clone ID: 701103211H1
gggaagaggcgagagaaacgaagaagaagagtgtttctcacatcacatggcctccttgcccttggggcaccaccaccaccaccacaaaccggcggcggcggctatacatccgacgcaaccgccgcagtctcagccgcaacccgaagttcctcgccggagctccgatgtggccaccgctaacgatatgtcagctactgtcattgagggg

SEQ ID NO: 22696 - DNA, 155 bp, Glycine max
  Clone ID: 701103212H1
cttttgttgttctgtgtttgtgtttgtcttttctctcacctgaaactgtcttgctgcggtggtacctgtggttgcggaagctcctgcaagtgcggcaacggctgcggaggctgcaagatgtaaccagacttgagctacactgactcaaccaccac

SEQ ID NO: 22697 - DNA, 153 bp, Glycine max
  Clone ID: 701103213H1
ggaagggacacatttgacatttcacgaccgcgttcttttctacggagcctcgaccaagaagaatcgcagagagaagagggtcagagtgagaaagagagagagagagagagaaactgagagaaattcgcaaaccctaatttcggaaagatcggc

SEQ ID NO: 22698 - DNA, 140 bp, Glycine max
  Clone ID: 701103215H1
gttatttttgttttgcttaggttatatctggatgagaaatgccagtcaaatacactttcttcccccacacatttttgtattcggtgacactcacgtagattttactaaatatctgagtattatatgaatttcaattaaat

SEQ ID NO: 22699 - DNA, 274 bp, Glycine max
  Clone ID: 701103217H1
caaacaacaatggacctccgtgaatcgataagcaaccaaaccgacgtggccctgagcatctcaaagctcctgttgtcgaaagaagctcgggacaagaacctcgtgtattcgccgctgtcgttgcacgttgttctgagcatcatcgccgctggctccaagggccccacactcgatcagcttctctcctaccctccgatccaaatccaccgatcatctcaactccttcgcctctcagctcttcgccgtcgtgctcttcgacgcctctcccgccggc

SEQ ID NO: 22700 - DNA, 265 bp, Glycine max
  Clone ID: 701103221H1
gtgacatcagtgcctccttctggtctccctggtgttggtctcctacgctgcccggtcggaatcagcgctgggcggctcgagccccatcacggacgtaaacgacagccacgtggcggagatcgccaactacgcgctgagcgagtacgacaagcgttctggggccaagctcacccttgtcaaggtcgtcaagggcgagactcaggtcgtttccggcaccaactaccgtctcgtcctcacagccacggatggatccgcgacggccagt

SEQ ID NO: 22701 - DNA, 192 bp, Glycine max
  Clone ID: 701103222H1
ctcagagcgacattctggttacccatagtctcatatagtgtcatacagcacaaaaattcagcaacacaaaacaatgggttctcttatggcaggatggtattctacccacatggatcatcaatcagccacacttacaaggcaccgcccactcactaaggctgaacttggtgcttactggacatcaacgcagac

SEQ ID NO: 22702 - DNA, 179 bp, Glycine max
  Clone ID: 701103223H1
ctagcccttatcacaactctatctaacaaattacataggacaggcccacacacacaacaagcttctttgtctctcgtgccgcttctacaccactattcccttcaccccaatcacactttccggtagttgttgctattagcgtagaagatgagtacgctggctccaccaagggctgaact

SEQ ID NO: 22703 - DNA, 267 bp, Glycine max
  Clone ID: 701103224H1
gtacatatagaaaaaccaagtaatactagccaaaatatgtctcccaaatacatgtcccttttcctcctagtaatactagggatggcttttctggccactacttcccttgctgatcgtcgttttctttcggtggaagatggtcatgatcaccatcaccaccacccaccaaaaaaacactggcctccaaccacacaaaatgaaccctcaaacgtagaaaacaaggagaacactgaggtggaggatggtcatgatcatcaccatcactac

SEQ ID NO: 22704 - DNA, 261 bp, Glycine max
  Clone ID: 701103226H1
ttcacttgttacttaccaaaaccacttccaaaaagcctaagattaccacatagtcacattcacattgaagttaaacttgcattgaaaatggagggaagagatgaggatgtaagagtaggagccaataggtatggagagaggcaaccaataggaacagctgcacagacacaagatgccaaagactacagagaggcaccaccagctccattgtttgagcctagagagttaacatcatggtctttctacagagcaggcatagca

SEQ ID NO: 22705 - DNA, 174 bp, Glycine max
  Clone ID: 701103227H1
gtgacatttaaaggtgcttggtcaatttccacttagatctataacatggtttagttggacatacttaatttgaagatatattttatttttattttcataaataattattaaaattttgcatttgttattcaaatattttctttcttaaaggaacaaattgtatattgcagaaac

SEQ ID NO: 22706 - DNA, 146 bp, Glycine max
  unsure at all n locations
  Clone ID: 701103228H1
gtgagctgttcgtccaagtcgctgcagttatgcttgctctcaggaaaaggctnatactactacaacttcagctcactctcctacttctcatgctacacgttggagggtcctttctggatatctggttttgcagtgctcattttcct

SEQ ID NO: 22707 - DNA, 268 bp, Glycine max
  Clone ID: 701103230H1
ctttattttttctcattctcattactctctctttgcagagaagagcgaaatgtcgctgagttccagctccaggggaagaataacgacggagcttcaagtccccaagaaatggacagagagagaaacaagtcccgcagagacccagggtttgggccgaccccaagcccaagcccaaaacgcccagaaaagtttccgtcgtttactacctctcccgaaacggccaactcgagcaccctcacttcatggaggttcctctctcttcgcctca

SEQ ID NO: 22708 - DNA, 247 bp, Glycine max
  Clone ID: 701103231H1
gttatggaaggacaactacttgtatatggagcaagtaggtgcaacggcgggagccaagcacatcactattttgatgtggccagtgaataagcctctgctttgggaatatgtactggacgagatgtaccatgctgccttaaatttgagcctaagaatcgcttttgagcaggccaaacgctgacgagcttttaaaggctcctacagaccagcttagggcgccacggccactgcagaagcaatacaaacg

SEQ ID NO: 22709 - DNA, 142 bp, Glycine max
  Clone ID: 701103232H1
atctgagcaacagcttttaattttctacttgcttgaattttattggaagccatggattgttcatcatggattaacacttccttggatctcaacattaatccccgcagagttcatgaagaagttcccaaggaggtagaaagcg

SEQ ID NO: 22710 - DNA, 192 bp, Glycine max
  Clone ID: 701103234H1
gggtcaacagctgtgactgcaatacttattgatggtcagaagcttatagtagcaaatgttggtgactcacgagctgttatttgtgagaatcgaaaggcaagacaactatctgtggatcatgaaccaagcaaggccaaaacctggattgcgaagcgtcgccggcttgtatcaaaaattccaggagatgtccct

SEQ ID NO: 22711 - DNA, 267 bp, Glycine max
  Clone ID: 701103235H1
ctgcagcccatttacggcccacagaacccgcccttggtcgcgcccaccaacgacgtgggcatcgaaggaatggtcatcaacgtggctaacctattggatgggaccgttaccaaccctttcgggaatggctacttccaaggacacaaagaggctccgctcgaagccgcttccgcttgcaacggtgtgtacggaaagggcgactacactggctacgctggggacctcttggtggacaccactaccggcgatactcacaatgctaccggc

SEQ ID NO: 22712 - DNA, 263 bp, Glycine max
  Clone ID: 701103236H1
gttttatttatggaaggctaggtatatagagaaaaaggacgtaattctattacgaaattattgtttatttaataaatttcctaatgtgaaaacaaatattatattttaaacatttttgaaaagtgaaacatctcagtatcaaaaaataacagaaatcaatagagattccgaaagtagtggtgagcgaaattggattaaggaataacaataactactaaactaaacagtgtggaataattgacccagcaggtgaaagtcctgtt

SEQ ID NO: 22713 - DNA, 224 bp, Glycine max
  Clone ID: 701103237H1
ttctaatcagaaaatccaacatgctttgctggagctagaaactgctctgatggcacctgatgacgatcaagttaacacaccgaatacattggccgagagcagcaggccaatggcatcaggccagagatccaggtcctggagcaatgagaaccatgtgtcacaatatactcaaactcagccatcatatgcaactgccaatatgcagtcaagtgaagttgtgcacg

SEQ ID NO: 22714 - DNA, 268 bp, Glycine max
  Clone ID: 701103204H1
cagtgataagccttgtgtcactggctaatgctggcttctcagagattagagggaagcatttgaactattcacagttttggaatgctaatccctctgcagaaaagcaggtcaagttgtctagcaaagctggcatgcttttgctgtacactcctgcttttcttgctggccttgcatccttctggatctttcctcatcaaggcctcagatccaccctccttcagtctgcagttaccctgcatttcttcaagagggtctttgaggttgtgtt

SEQ ID NO: 22715 - DNA, 265 bp, Glycine max
  Clone ID: 701103238H1
agcctcctttccatttttcttctcctctctctggtaaccttcctctcctttttaatccaaatcatcgttcttattttttcaaggatatttttgctgtgattgcgtgaatttcgatcaacctttgaagcatcctttgctgcaacttttaggtctcaattttaaggtcaactttctgtgccgggtcgttcaacttgcatctttatcatttgatctattgtttgagttgacgagtgaacttgtgtgacatcatagtttctgtgagaga

SEQ ID NO: 22716 - DNA, 267 bp, Glycine max
  Clone ID: 701103239H1
ttcctttcttttcattacatacgcaaaacccattttactccctctttcacaaaagaacaatatctctattttccaaactacacacatcatttagaatccatgtctttctctaccaaattacctttagtcctattattttcatcccttttcatccatgcatcttttgctgatatggtgtgtgatgtcctgccaaaggaagtgtgtgctttctcagtagcttcatcagggcacaggtgtttgttggagactgagacggccgccgacggt

SEQ ID NO: 22717 - DNA, 115 bp, Glycine max
  Clone ID: 701103166H1
gttgacctactattctcccctcatcggagctcaaatctccgatcccttcatccatatcgcttcaccggaactttctcttcatccatcgcaagatctagatgaatctcaaccgcgc

SEQ ID NO: 22718 - DNA, 224 bp, Glycine max
  Clone ID: 701103169H1
gtgatccttgggtcaaaatattctacgtctgcagatctttggtcttttgcttgcatttgttttgagcttgcaactggagatctgttatttgaatctcacagtggtgagcagctttgctagggatgaggaccacttagcattaatggtggaagttcttggaatgatgccaactaagatagcacttggtggacgttcattccgtgctttctttaatgacatatggt

SEQ ID NO: 22719 - DNA, 260 bp, Glycine max
  Clone ID: 701103170H1
attctttccctttgacaactgcaatctaaggtagaaataacaaacacaacatgggttctttgggcacaatcaacaagccacatgctgtgtgcataccgtacccagcacaaggccacataaacccaatgctaaaactagcaaaactccttcacttcaaaggctttcacataacctttgtaaacactgagtataaccacaaacgccttctcaaagcaagaggccctgattcccttaatggcctctcttcatttcgctttgag

SEQ ID NO: 22720 - DNA, 255 bp, Glycine max
  Clone ID: 701103171H1
ataagaacacgtaccttaatttcgcaaaatcaaccaaagacagagaaaaaatccaaagagtaaaaggaacagaagagaaagcttgaagctatggggaacaccatgggaaggagtaaaaagaccaaggtgatgaaggtggatggagaaacgttcaagctgaagactccagcgagagcaaacgacgtcgtaaaggactaccccggtcacgttttgctggactccgaagcggtgaaacatttcgggcttcgggccaaa

SEQ ID NO: 22721 - DNA, 195 bp, Glycine max
  Clone ID: 701103172H1
gtcttgccgtggcttggacgctacgtcttgttatgatagcagtgcagagactcacaatcctttgttcttatacaagaacagtgttgatgtccacactctcaaacaaatttgtcaacgcacagaatcgaagtacacaaattgcagtggaggacgtttataaccacagaattgtgacttcatttgcgagaatcacga

SEQ ID NO: 22722 - DNA, 259 bp, Glycine max
  Clone ID: 701103173H1
cctgaatgctacgtcagcaattaggtgctgaaaatcttcgatcattctccccaaccatggcatttgtaggatgattcaggattggtgtgtcgcaaatagttcttatgggattgatagaatccccagaactcgtattcctatctcgggatacgaggtttccgacatgtgtaccaggatcttgttggcttgctatcgtggagatgacaagaggtgtcaggagttggtcgggaagattaaggtttggagtagagagagtgag

SEQ ID NO: 22723 - DNA, 261 bp, Glycine max
  Clone ID: 701103176H1
atctcactaaactgggtagcacttggatctccaagaaagccaaggcagagatttcccacataaccgacgacctatcatctctctcaaatactgtcgaagagaaggcaaagcttttcatcaacaagctcaaaggtaaaacccagaaagccttgccagatctccttcgagagtacaacattcctccgggtctgttcccccgcaacataacatgctacgaatttgatgcatcaaagggaaagttgatcgtgtacttatcctcac

SEQ ID NO: 22724 - DNA, 154 bp, Glycine max
  Clone ID: 701103178H1
tgaattcaaaaacttaagttcattccttgtgttttgctttcttgctcaaaaccaaacatgtcgaacacatgcggcaactgcggatgcgctgacaagactagctcgaccaagggaaacagctatggtgttattgtagagactgagaagagttaca

SEQ ID NO: 22725 - DNA, 132 bp, Glycine max
  Clone ID: 701103179H1
cttcatttcttactctcactgaaaaaaaatagcttgttcacaccatcctgttttttcaactcatatatacaggtatatataacctggcttctagcttctctcgaagcctagcacttgcaagcttttacattg

SEQ ID NO: 22726 - DNA, 205 bp, Glycine max
  Clone ID: 701103180H1
agctgcggttgctccatcacctaatcacttccccacttcccctgtaaatcacgtttagttcgcacaaggttttaaaaaatggctgatgctgaggacattcaaactcttgttgttgataatggaactggaatggtcaaggcgagttttcaacgtgatgacgctcctagggccgtgttcccagtattattgggcgacaacgcaatac

SEQ ID NO: 22727 - DNA, 251 bp, Glycine max
  Clone ID: 701103181H1
ctctagccgctcgagccgtttcaggcgtcgttgatctttttctttcgaagagatcctcgcatacacatctcacacttctcccacaagcagtcagatttgcattcgagttagcgcttcatatatacgcgagaatctagtagaccagtatatgtatctctactgataatcctatgcatggcttctaccgcaactcccgttatgcgatactgctcgcttttcgatcatctccacgaagagatgaaaatggagtg

SEQ ID NO: 22728 - DNA, 256 bp, Glycine max
  Clone ID: 701103182H1
tgtacatggaagcaagaccattggaggaaggtcttgctgaggccattgatgatggcaagattggaccaagggatgaccccaaggttcgttccaagatcttgtctgaagagctcggttgggacaaggatcttgccaagaaaatctggtgctttggccctgagacccttggacccaacatggtggttgatatgtgcaagggagtccagtatttgaatgaaatcaaggattctgtggttgctggattccagtgggcatc

SEQ ID NO: 22729 - DNA, 256 bp, Glycine max
  Clone ID: 701103183H1
aatcgagccgaatcggctcgagttttgtttgtacccttcgattcttcatcttcatagttgaagatttataccaagtatgtataacagtatataaagccgtgtttgttgggtgttttggaggatatgcttgtcttgctgtgttcagtggattgtgttaaaggggtattgaagatttttgttgaagttgaaaaatctgagagttttttggttgaagttctgctcccatcggtgctcaattgcaaaaatctgcagatga

SEQ ID NO: 22730 - DNA, 253 bp, Glycine max
  Clone ID: 701103184H1
gattgagacagattatacagaagattatgtagcaatttcggggtaccctctaagtgctgcttattgtattacaaggattactggcgcccttgagagaaagtggaagattttgtgatttaacaccaccttcagttcatgcctgagacgatttagtaattcgagttccatagtcaatttatgtaatatcagggataggggcctagcagtgatttagaaaatacaatatatgttgatttttttgaggcattgatgt

SEQ ID NO: 22731 - DNA, 259 bp, Glycine max
  Clone ID: 701103185H1
cgccaaataaacactctcactataaactccaaagtcccaacgctaaaccaaaccaaaactaaaacaatgttgtctgtctgagtttacattgagagtgcccaagttcgaattcgaaagcaaaaacatgtttttggcgagacccattttccgaggaccctcactttgggcgttgcactcttcctatgagtattcctctgcctctgcagctgatatacaagctgagagaaccatcaaagaagggcccagagacgattggagc

SEQ ID NO: 22732 - DNA, 115 bp, Glycine max
  Clone ID: 701103186H1
ctccgaaacccaatgcccggggcaatgcgcgtggccattccaacacctcatttatgggccacagagctcatccttggttgcatccaacaacgatgtgggccttgacgggatggtc

SEQ ID NO: 22733 - DNA, 259 bp, Glycine max
  Clone ID: 701103187H1
cgggaatatttggggcgaggtcctcctcctggctctggacgctgctttaattgtggccttgatggtcattgggcacgggattgcaaagctggggattggaagaataagtgttaccgctgtggggagagaggacatatagaaaggaactgcaagaacagccccaaaaaattgagcacaaggcgaggacggagttattcacggtcaccagtcaggtcacattcacctcgtcgtggcagaagccgtgatcgcagttacagcc

SEQ ID NO: 22734 - DNA, 260 bp, Glycine max
  Clone ID: 701103188H1
aggtgacggagaattagggttcgattccggagagggagcctgagaaacggctaccacatccaaggaaggcagcaggcgcgcaaattacccaatcctgacacggggaggtagtgacaataaataacaataccgggctcattgagtctggtaattggaatgagtacaatctacatcccttaacgacgatccattggagggcaagtctggtgccagcagccgcggtaattccagctccaatagcgtatatttaagttgttgca

SEQ ID NO: 22735 - DNA, 261 bp, Glycine max
  Clone ID: 701103189H1
cttttcttctcttcttcttcttcttctacccttcaatattaatattccgtgcaaaaaccaccaacaacaacatcaccaccaacaagaagaacaagattggcgttatgggtctcttcctttctaggaatttggcttgcaaattcatatacccttttcttttctccaagaaggtttccaaggatttgtttcccaagcagttggagaacatgatgtctctgatctctcctcgtactggcaggcatttgcagcgctatgacaatg

SEQ ID NO: 22736 - DNA, 255 bp, Glycine max
  Clone ID: 701103191H1
gcagttagagacagagagagagagaaacaaaaccctaattggtgagtggcgaaaatggcgcagcaggcggcggcagcagcagcaacaggagcagcagtaatcgagcaagtgcagtgcttcgggcggaagaagacagcggtggcagtgacctactgcaagcgtggtcgaggcctcatcaagatcaatggctgcccgatcgagctggtggagccggagatcctccgtttcaaggccttcgagccaatcctcctcctc

SEQ ID NO: 22737 - DNA, 256 bp, Glycine max
  Clone ID: 701103192H1
agcaagggtgttgtagtatagttagagatatcactactacaccaccctgcatagtttgttcagctataatactcattgagcttctttacctacttttcaaacctacattgcacacaaaatggcagcatcttggtcatgttatctacttgcattgcttctttttatgtcaactattgtatcagagagtagagtggcaaggacggacttgggcctggaccttggtgggttgggggttggacttggactgggtttgggc

SEQ ID NO: 22738 - DNA, 191 bp, Glycine max
  Clone ID: 701103193H1
gaaaaaagagaaagtgaaaattagaaactcttgtacttggttttatgccaaattagggactcttttggttgtcaattagatcacaaagatatggaggttgccatggaactggaagatgatctattttttgctgatttgagcaaggaaattgctctactaattatggatgaagatgaagatccacttgcttc

SEQ ID NO: 22739 - DNA, 224 bp, Glycine max
  Clone ID: 701103194H1
gaggaaccgtgttctctaatcttgtaattttctgtgtcgcttcgtggttcattcttctcgttcttgtgatctgttctattttggagtacttacaacactcctttgcaagtttaattaattaaagaggctaatcaattttcaattggactgcagcagatggctgaggagggttgcagggttactctaaatgtttatcacttgagccaaggactagcacggcagtt

SEQ ID NO: 22740 - DNA, 78 bp, Glycine max
  Clone ID: 701103195H1
atctatctgaagctgaaaacgccgacgcccgacggtgatgatgaagatggggtcctcaccttcacgttgctccttctt

SEQ ID NO: 22741 - DNA, 199 bp, Glycine max
  Clone ID: 701103196H1
ctggcccacactagcatgcccaagtgggaatggggttcaattctggacccacgaatgggagaaacacggcacttgctctcagtcagtccttaaacaacatgactattttgaaacagctctcgatctcaagcagagagccaacctcctccaagctcttacaaatgctggaatacaaccagatggagggttttacagccta

SEQ ID NO: 22742 - DNA, 259 bp, Glycine max
  Clone ID: 701103164H1
ccagacaccagctgcaaatcatccttatcagcattctatgcagccagggtctggacaggctgcacatgccccagctgaatctggaacatcagcatcaggatcgcagcagcattaaacttgccatatactgatgtttctagcatgtttaagtttttccttaaactaactatgctgtcagggaagatattttcactcaagttgtcaatttactatctctactagctggatatgccttcccttgtggcatgaacgggttatt

SEQ ID NO: 22743 - DNA, 270 bp, Glycine max
  Clone ID: 701103201H1
ggcagcgagcgctcccactccacgcgaagagttcgtgtacatggcgaagctggcggagcaggccgagcgctacgaggcgatggtggagttcatggagaaggtctccgcctccgccgagagcgaggagctgaccgtggaggagcgcaacctcctctccgtcgcctacaagaacgtaatcggcgctcgcttcgcctcctggcgcatcatctcctccattgagcagaaggaggagagccgcggcaacgaggaccacgtcgccgtcatccgtga

SEQ ID NO: 22744 - DNA, 75 bp, Glycine max
  Clone ID: 701103202H1
ggattttggctctctctatttctctgtcgtctctttcatttcccctctcttgttggttccaattactctctctct

SEQ ID NO: 22745 - DNA, 267 bp, Glycine max
  Clone ID: 701103203H1
tttcttctttgttttcaattaggtttttttgttgctctccttcaaactccatctttccaaatcctctctttgcgattgtgttttgatctgcttcctactgcgatagtttctctactgttacatggccatggcggtttccgcaattggttttgaaggtttcgagaaaaggttggaaatatcctttttccagccgggactttttgctgaccctgaaggaaggggtctaagggctcttacaaaatcccagttgggtgagattctaacacc

SEQ ID NO: 22746 - DNA, 263 bp, Glycine max
  Clone ID: 701103113H1
gaattagggttttccaattcacagagcaacacaacgaaccaacaatggcgcagctacagacgcagtcgcagccgcagcacgggcaagcagcgctggagcaggtgcagtgcttcggtcgcaagaagaccgccgtcgccgtgacctactgcaagcgcgggcgcggtctcatcaagatcaacggctgccccattgagctcgtggagccggagatcctccgcttcaaggccttcgagcctatcctcctgttgggtaagagcgcttcg

SEQ ID NO: 22747 - DNA, 219 bp, Glycine max
  Clone ID: 701103114H1
gtagattagagccatgataaaggaattcaacacccaaaccgaggttagtgtgagattggaagccctctgggcagttctgtccaaggatttcgtcaccgtagctcaacaggtactcaccaatattgtgaaggatgtgcaagtgattgaaggtgatggaggggttggtaaaatcctcatctttaatttttggtctgatgtgtcccaaattaccaagggaga

SEQ ID NO: 22748 - DNA, 193 bp, Glycine max
  Clone ID: 701103115H1
agaaactccagcaccagcaccagaggatgatggattgagcggtatcccaattgcgcccagtgcgaacaacactaacaaacccaacgtcatcttcattcttgaaaaagcttctttggaagtcgccaaagtcggcaagaaatatcagctcttaacactccgacgaacatgcaattttcctcggaaaaaataacaa

SEQ ID NO: 22749 - DNA, 155 bp, Glycine max
  Clone ID: 701103116H1
gaaagattgaccatagagttctcgcgggaagctgacatactttccaagcttcaccatccaaatgtggtggcattttatggtgtagttcaggatggaccaggagcaacattagcgactgttaccgagttcatggtggatcgttctcttaggaatgt

SEQ ID NO: 22750 - DNA, 51 bp, Glycine max
  Clone ID: 701103119H1
atcctcaggagatcgttgatcttttcaacaaacgattcctggataaacagt

SEQ ID NO: 22751 - DNA, 264 bp, Glycine max
  Clone ID: 701103120H1
ggagcgcttacaccttgcagaatcatctctacattcccaagggctcctactacgcagtaactccaagcccgatctcacatcaatctctcatttactcatcttaatcaatattaaataagaaaagatgggcgatatgtccaacttccaattgggtgtgattggtcgcgtatttatctctgtagcttcttctgtccccattgtcatctgcaacaaatgcttgatgcgcaatcttggcttcacttttgccacaatgcttactagttg

SEQ ID NO: 22752 - DNA, 264 bp, Glycine max
  Clone ID: 701103125H1
agaaatgattgcaatgaaaagcttatgaatctcccagttattcgagttcttttctccagtgagaagatccaagatatcatttccctgtgtgcaaattccattgtcattcttggacaaggaagcttatatcgctatgcaatttcctgaagctgctttgattatctttgtatcttttctgtggaaatcaatattcctggctcccttgatgttctaaagtgtacttgtgtggttcatcgataaattctatctttccatagtgctctg

SEQ ID NO: 22753 - DNA, 266 bp, Glycine max
  Clone ID: 701103126H1
ctttcacatcaactcaagagattcaaccaagtcatagaagctagctagggtgtattgttacatttgttagcaaaaaacttgaaaaaatggagagcagcttgggagacatgttgattaaggttgtggtgttcattctagttcaagccttggtgtaccttatcctctccaattcatcagacatcttcagcaaggacatgaagaaatccaacagcttcaggccagcgaggtcggtgagcattcgccggatgctggctttgatctctgat

SEQ ID NO: 22754 - DNA, 115 bp, Glycine max
  Clone ID: 701103127H1
aatgggctcgagtagcgacaagtaccgttagttcgcagttgacttatgtgcaatacgtgatttgaaagagacgacggatgcgctcagggaggtgctgaatggggaagtttggtta

SEQ ID NO: 22755 - DNA, 85 bp, Glycine max
  Clone ID: 701103131H1
ctactttatacatctgtataagcctttagtcatgtttgaaccaagggacatgtggaccaagctgaacgaaaagggtgagccaatt

SEQ ID NO: 22756 - DNA, 169 bp, Glycine max
  Clone ID: 701103132H1
tgagaattgggcattggctcagtcattctgaggcaggtggcgctgccaaacgcagaacctccgggagaaattgccaccgcaaagacgtggaagacgggtactagtagtacatctgccattatctcatattccctgtactaattacagcatcatgaacagcgagcgacag

SEQ ID NO: 22757 - DNA, 86 bp, Glycine max
  Clone ID: 701103133H1
ggctctttgttccagtcatcatggctgcagaggagtaatgcgtgtctgcaatgtcgccggaatcatcgccggcacgaggttcatgc

SEQ ID NO: 22758 - DNA, 262 bp, Glycine max
  Clone ID: 701103136H1
atcatgaattacatgagcatgagcttgtgttgaagcgccgcagggtgtattcctgtgatgcttgacatgacgaggcgcatatatggtcctactactgtggacgattgtgactttgatctccatccaaaatgtgcattggaaaaggcggacaaagcaggcagcaaagatgatggcaaggacgataagtccaaagatcactgggtttgtgcatggagaagtctgcaacaacacctcaaagctgcttgtcaagggttttggtgat

SEQ ID NO: 22759 - DNA, 138 bp, Glycine max
  Clone ID: 701103138H1
aatcgagccgaatcggctcgaagcttctatctgatttcagtccatatactcatggacatcttcactgggcgtagtgattatcaaccataattttagattattaagttttgggcttggggaaattatttcgattatatt

SEQ ID NO: 22760 - DNA, 109 bp, Glycine max
  Clone ID: 701103139H1
ggaggagtacaaattcgagtatggacccttggtttttgaacatgcagagcaaatcctagagacgacagatatatgcactataatacgtgactcgcagtcttcagatgta

SEQ ID NO: 22761 - DNA, 264 bp, Glycine max
  Clone ID: 701103141H1
acagaacctgccccgtcaccaaccaggtgctgacaaccttcgacatcatccccaaccacgccattcgcaggatgattcaggattggtgtgtcgaaaatagttcttatgggattgatagaatccccacacctcgtattcctatctcggcatacgaggtttccgacacgtgtaccaggatcttgttggcttgctagcgtggagatgataagaggtgtcaggagttggtcgggaagattaaggtttggagtagagagagtgagagga

SEQ ID NO: 22762 - DNA, 256 bp, Glycine max
  Clone ID: 701103142H1
tccacacccaacattctcacaagtcacagccaaacaccatttcattaattcttgcagaatattgcttagttttgttttatctgaatttggaaacagcttttgaatggctttttcaagagttgcactgctaatatgcacggtcgggtattttgtgattgcctctgccggcaatttccaccaagattttgatatcacatggggagatggtcgggctaagatactcaacaatggagagcttctcaatctgtcacttgac

SEQ ID NO: 22763 - DNA, 238 bp, Glycine max
  Clone ID: 701103143H1
gaacaatatgggtcaaatcgggttggcgctcggatacccagatatctcgctctttctgtctttgacaagtattttcgggtttttcggacggataatctcgggtaccgtttcggagttcaccatcaagaaagctgcaacacctaggcctctttggaatgcagcatctcagcttctaatggcggtaggttacatactcctggccatggctatgccacgttccctatacattgggtccatt

SEQ ID NO: 22764 - DNA, 111 bp, Glycine max
  Clone ID: 701103144H1
ctcgagccggctgtgggagagaatggatattacaagatctgcagacgtccaactgtgtgtggactagattccatggtgtcaactgtagatgctccatatccatccagccat

SEQ ID NO: 22765 - DNA, 262 bp, Glycine max
  Clone ID: 701103145H1
gaacatatagaaaaaccaagtaatactagccaaaatatgtctcccaaatacatgtcccttttcctcctagtaatactagggatggcctttctggccactacttcccttgctgatcgtcgttttctttcggtggaagatggtcatgatccaccatcaccaccacccaccaaaaaaacactggcctccaaccaaacaaaatgaaccttcaaacgtagaaaacgaggagaacactgaggtggaggatggtcatgatcatcaccat

SEQ ID NO: 22766 - DNA, 102 bp, Glycine max
  Clone ID: 701103146H1
atcattcacaaagcttcattcttcatagttcagagttcagatccattcttgtcctatgtgctggttcgtcttgccagaggtctctttaaaattgtctatcga

SEQ ID NO: 22767 - DNA, 98 bp, Glycine max
  Clone ID: 701103147H1
acacaacagaaatgaacctcgtgtgcttctcgattcagacccaatggcggaacatcacgcctccgatactatatagcgcggatttatccagatcaagc

SEQ ID NO: 22768 - DNA, 93 bp, Glycine max
  Clone ID: 701103150H1
gttcaatttccctaggggcttaatatctcccctcacttgtgcctagccttatgccatagtattatcattcactctcatctttctctcttctct

SEQ ID NO: 22769 - DNA, 258 bp, Glycine max
  Clone ID: 701103152H1
ggaaaacctgacttgggcctggtccaggctagatggtcctttgtgaacaaggatgagaatctactcacgaggctccagaacatcaacttgtgctttcactttgaggtggaacaacaagttaatggctacttcctaaatttctttggattcaatggaacagctggtgtttggaggataaaggctttggaggaatcaggagggtggttggagaggaccacggttgaggacatggacatagcagttcgagctcacttgaat

SEQ ID NO: 22770 - DNA, 108 bp, Glycine max
  Clone ID: 701103155H1
ctttcaatctcatttctctgtctctgcttcctcttcttcgatctcaccctgaattccctggacaatcatcatggctgacacacgaggaacatcatgtcgaatatgcag

SEQ ID NO: 22771 - DNA, 258 bp, Glycine max
  Clone ID: 701103112H1
tactcgagccgaatcggctcgaggccttctttaactaacatggttaactgtaggtgactccatcattcatatcttagtttccgagttatttagctctctcactcctttgattttaagtacatcgatttagcccctaaacttagtgcatcttttcgatgactgtcttgtccagatattcacgtgcagtcactattctcttcgtccatttcctttgatcacagagcaatttatcctaggctagtcttttgctttcccacc

SEQ ID NO: 22772 - DNA, 241 bp, Glycine max
  Clone ID: 701103156H1
gtttgtgcacatggcaagcttggacttctacttgcaccagaaccaagatggggcttcgcttttggattggaacaagaggttcaggattgctgctggagcagctagagggcttcaatacctgcatgaagtggtggcaccaaacatagtacatggatgtgttacgtcctctaatattctaattgatgttaacttttgtgctaggatttgtgattatgggcttaactttttggcacctgtggaa

SEQ ID NO: 22773 - DNA, 192 bp, Glycine max
  Clone ID: 701103158H1
agataaaatggggtctctaatggcctctcttactctcactcttgtattggcaatagtttctctaagcttgtactctcaagcctcagctgacaagtacgactattcatctccaccaccaccagtttaacagtacaagtccccaccaccaccatacaagtattcatctcatccaccacctccaacgaagcccta

SEQ ID NO: 22774 - DNA, 264 bp, Glycine max
  Clone ID: 701103159H1
cttagattcaaacgtccccagaatcaacaatcccgtgaccttctgcacattccttctcagatcgattggagacagagcggcgcagttacacccgtcaaagaccaagcaagctgtggtgcatgttgggcgttctcagctactggtgctattgaaggcataaataagattgtcacagggtctcttgtaagcctttctgaacaagagctgatagattgtgatacatcctacaacagtggttgtggaggtggactcatggattttgca

SEQ ID NO: 22775 - DNA, 261 bp, Glycine max
  Clone ID: 701103160H1
atttttattccttctttgtttcttcactttcttccatacacataaccatgtcttctcagactgttgtcctcaaagttggtatgtcatgtcaagggtgtgctggagcagtgaacagggttttgggaaaaatggaaggtgttgagtcatttgacattgatctgaaggagcagaaggtgacagtgaaaggaaatgtggagccagatgaagttctgcaagccgtttccaaatctgggaagaagactgcattctgggtggatgaag

SEQ ID NO: 22776 - DNA, 163 bp, Glycine max
  Clone ID: 701103161H1
tgtagcgcatacagcttgccagggctgtgtatcaagactctgatatatatcttcttgatgatgtttttagtgctgttgatgcacacactggcaatgaaatattcaaggaatgcgtgaagggggctctgaaaggcacgaccgttattcttgttacacaccaagt

SEQ ID NO: 22777 - DNA, 75 bp, Glycine max
  Clone ID: 701103162H1
catgagatcagccaggcgctgagcctcctcggcctggaagcagccgtggcggagtggacgtcatgacgaaactct

SEQ ID NO: 22778 - DNA, 131 bp, Glycine max
  Clone ID: 701103163H1
ccaccattgaaattgattctctatacgagggaattgatttctactccactgttactcgtgccagatttgaggagctcaacatggatctcttcaggaaatgtatggagccggtggagaatgtttgagggatg

SEQ ID NO: 22779 - DNA, 263 bp, Glycine max
  unsure at all n locations
  Clone ID: 701103075H1
ctcgagccgctcgagccgattcggctcgagagattgggttggtagatactgctgctgtctaacacagcattaccnggtccctatggttcaagaaattgcacggttggagttattcacaagtgagaaatttcctaagctccacaattggagccaagaatttttgaaccatccaattgtcaaagaaagtctgccccctagagatcctgttttctcctttttcaagggtctctatgaaagcctttttggttcaaaatagatttgat

SEQ ID NO: 22780 - DNA, 261 bp, Glycine max
  Clone ID: 701103078H1
ggtaactgcccatatatacacatgagattcgcaccttcctccaagttcttaggcttttcaaatctctttcactatcttatcgcaccctctttctctccgaccccaaagttctcatcttccatttccgctaccatgtccactttttccactcagaacgacaccctcatccacaaaacgcagcaacctttgcagatcgcaaagcgcttagaaaaatttcagacaacaatcttcactcaaatgagcttgcttgccatcaaacat

SEQ ID NO: 22781 - DNA, 266 bp, Glycine max
  Clone ID: 701103079H1
cagatgctgattctcttgacttcaactgtgggagcaaacacacactttatttgagggaggatattatggatatggaagctgcagccaagatgtttgagcaggaagatgggatattggatgagataaggaagcaaactaaaagtgaccagaacatgtatgcatatcctttgtcaaatatgtttcagggagccgaggcaaatggatacacgccttattgtgagctaaaacttgattctgttgctgaattttatgcaactccagagcac

SEQ ID NO: 22782 - DNA, 260 bp, Glycine max
  Clone ID: 701103080H1
tggaaactcagggattggtggtggatggcagctagcatggaaatggtctgaaacagaaggtgttttcaagagaatatatttgcaccaagaaggtggtcctggatctagacgtgggtccatcatttcacttccaggctgtgatgcgccgacactaacagatggtgagattgtccaggctgccgctctagtgagtcaatcagccctttacaacaaggagcttatgcatcagcagccagttggaccagccatgattcatccat

SEQ ID NO: 22783 - DNA, 262 bp, Glycine max
  Clone ID: 701103081H1
tcccacgccacggtgctcctccttgcacttttactgcgttccactgttcttcatcttccttctggtcaatggttgctctacaattattctatttttcccattcagtattcttcactaggtgcaagtattcctcttagcgccaatcttcagcaaatttgaatacttttcgcggattcatcatttttaatcttgtttgggctctgaatactcaaggggttttaaggatatttcgttactgggtatcattttctcaaaaaaccat

SEQ ID NO: 22784 - DNA, 265 bp, Glycine max
  Clone ID: 701103082H1
cttctaaaccttcatcaaacataactctcttcctagagaaacataacatatttttatagcataggacttatttgattcttgttaattcacaccacaaggataattgacatgggatcaagcttctctagttgttatgagggtgaatctgtgtctccttctccaaagccaaccaaagtggtggctacgaagggtggttcttcttccaacagggtctctataacggacttgagttttcctggctcaacgctttcggaggatctctccg

SEQ ID NO: 22785 - DNA, 258 bp, Glycine max
  Clone ID: 701103084H1
cgatgatgatgaggaagagagcaagaccaaaaagaagtcatcagcacctaagaagagtggaagagcacaacttggtgatggccagcagggtgagcgacctccagagtgcaagcagcagtagaagtatttatgcagaatgtcatttatgtagttgagttttgttggtgttcgagaatgtcctaatgtgaaagtgggtttcatgttgttttttaatgtctcttaaattgattttcctccctatatcttggcagtccgaat

SEQ ID NO: 22786 - DNA, 261 bp, Glycine max
  Clone ID: 701103085H1
ctcaccgacttaccaatccttaccaaactccgactacccagaagtactactcggcaggcagacggtgggtgctaacgtccatcgtcaagagggaaacaaccctgacctacagctaaggcccccaaatcgtggttaagtgggaaagcatgtgggaatacttagacaaccaggaggttggcttagaagcagccatcctttaaagatagcgtaacagctcactggtcaagtgttcctgcggcgaagatgtaacggggctcaaac

SEQ ID NO: 22787 - DNA, 259 bp, Glycine max
  Clone ID: 701103086H1
cgcgtttcggagagagacgtcgcaatggggaggaggcctgcaaggtgttatcggcagataaaaaacaagccataccccaaatcacgcttttgccgtggtgttcctgatcctaagatcagaatttatgatgttggtatgaagaagaaaggtgttgatgagtttcccttctgtgttcatctggttagctgggaaaaagaaaatgtttcaagtgaagcattggaagctgctagaattgcatgcaacaaatatatggcgaaat

SEQ ID NO: 22788 - DNA, 259 bp, Glycine max
  Clone ID: 701103087H1
ggaatatttgtgctcagaaagttaattctatggtcatttgactcatatactttttgttgaccttgctctaatggtttttgctggtgctaaacctctgttggataaaacgcttggcattcttgtggaaggcttgattgacacattcatcagcatttttcatgaaaatgaagctacagatcttagtgcaattgatacaaatggattctgtcagctcatgcttgagcttgagtactttgagaccatattagatccatatttt

SEQ ID NO: 22789 - DNA, 219 bp, Glycine max
  Clone ID: 701103088H1
caaaattaatcatcttacttatttattccaaaaatggttgatttacattggaaatcaaagatgccaagttccgacatgccttccaaaactctaaaactctctctctccgacaacaagtccttaccctctttgcaactacccttccgcaccacagatatctctcacgccgcaccttctgtctgcccacactacgactactatctccgtcttcctcaactc

SEQ ID NO: 22790 - DNA, 259 bp, Glycine max
  Clone ID: 701103089H1
ataaaaaaggttaattagtaaagtcacacgtgctttctaacggtggcgcaccagaggggtttaggttcaggttcgggcgaagttcttggcggcggaacaaggcggcgatgaggaaacggaagagagtactgtaggttcggttccgagccatgtggtctctgcagcttcggcccaaaccaataatcagtgggtcccggcaagtggttctccaatgatgtcacgttttatgaatgctccttcctctccaggattgtctcct

SEQ ID NO: 22791 - DNA, 261 bp, Glycine max
  Clone ID: 701103091H1
ctcgagccgcaaaaagattagctttatactatctgcatttcgtggtcaagttgctactctaacgatgcatccttatggatgccgagtcatgcagagagttctagaacattgcacagacgagagtcaatgccagtttattgtagatgaaatcttggagtcagtctgtgctcttgctcaggatcagtatggtaattatgttacgcagcatgtcttggagagaggaaagcctcaagaaaggagtcaaattatcaacaagttgtc

SEQ ID NO: 22792 - DNA, 262 bp, Glycine max
  Clone ID: 701103092H1
gaaattagaaatatttattcattgtcaccaaatcttgttccctgcaagagaaagaaagaagggagagaagaagttgttgggttgagttggattggatttctaatctaatctatacctttcttttttcctatgcttttaaggcacaaacccttctttcttccctcttctttcttcttcttattgttattccttgcctttaccctttagggaaggaagaaggaacaactatactactattatccttattattgttattattgta

SEQ ID NO: 22793 - DNA, 261 bp, Glycine max
  Clone ID: 701103093H1
gaaaaacacaacaatggggaaccaatcctcttcaaacaagatagaaactcttcccatcgacacaacatttaagcctccagcaaatataccagtttggccacaaggtggtggatttgctactggaaccatcaacataggagggctaaaattgtttcaaatttcaacattcaacaaagtttggaaaaccttagaaggtggaccaggtgatgcaggggcagctttctttgagccagcaggaatacctgagggattcttcacact

SEQ ID NO: 22794 - DNA, 261 bp, Glycine max
  Clone ID: 701103094H1
cggtgctgaagtggtggaatgtgcctgtgtcattggtgtgcctgatgtcaaggggcagtgcaggcgtattggaaagccactttatgttcttgttgagccgcgtaaagcagataaatgttacccagattgacatactaaaggacgctgggtgtgagccacacaggccataatgtgatccttaagttttaggctgatggagtcgtgttcatggcaattgtcaaatatcatcctgggaaatgttcatcctgtttcatatcttta

SEQ ID NO: 22795 - DNA, 264 bp, Glycine max
  Clone ID: 701103095H1
ctcgccgactcggttgctatcagcgagtgagagtgagtgagtggttctcttgcagcaacaacgtttagtgacaccaaacagacgggaaatgggtcgtggggtcagtgctggtggtggacagagttccttggattatctctttggcagtggggtacctgccagcagtgcaaatggtgctcgcactcaaaatgcaagtgctccttcaccaccggttgataagcaaagtcgagcaccagcaccagcaccaggacctgcacctgcagc

SEQ ID NO: 22796 - DNA, 257 bp, Glycine max
  Clone ID: 701103096H1
gaatgatgagtgtgaatgacaaccaaactggttcgaaatatatgggtaaccaatatttctataatgattcagtagtggttgtaatgaaaggtcaatacatggagctcgagaggatattaactatttttacaaccattgaattatcaaataatatgtttgaaggagaacttctgaaagtccttggcgaattgcattctctcaaagggcttaacctttcgcacaatgcaatcacgggtaccattccacgatcctttggt

SEQ ID NO: 22797 - DNA, 251 bp, Glycine max
  Clone ID: 701103101H1
ttcagtccctgccctaagcccggaaaacgacctcttcataatcgtgaagtgcttcgccgccggaatcatcctcggcacggggttcatgcatgtgctcccggattccttcgccatgctctggtcggattgcttgaaggagaagccgtggcacgagtttcccttttcgggcctggtcgcaatgttctccgccataatcacgatgatggttgattccattggccacaagtgtttacaccaagaggtgtaggact

SEQ ID NO: 22798 - DNA, 203 bp, Glycine max
  Clone ID: 701103104H1
gttaggttctgcacgatctgcttccagcgagtgttctttcttcgcttcaacaccttaatttgcacacggtgcttactcagcttgagaaatggcacaagaaatctttctattcacatctgaatctgtacacgagggtcaccccgacaagctgtgcgaccagatctctgatgcagtgctcgatgagtgccttgaagaggaccctg

SEQ ID NO: 22799 - DNA, 264 bp, Glycine max
  Clone ID: 701103106H1
cacttcctctcattctgttttgactttgtcaaatggcctttgcaagtgtcgtacacattgtcgcatttcttcttgctagaagctctttaagctaattatgagctccgttctcctctgctttgtcccatctgtgaagatgtatgcaaagaagtggaatgtggacaaggaacatgtaaaccttccaagaacagcactttcttctttgaatgcgagtgccacccgggttggaagagagctcttgcaaatgataagatgggtttgaag

SEQ ID NO: 22800 - DNA, 260 bp, Glycine max
  Clone ID: 701103107H1
gtttggaaaccttagcaggtggaccaggtgatgcaggggcagctttcgttgagccagcacgaatacctgacggattcctcacactaggccactccagccaacccaacaacaagtccctttttggatcaattctggtgccaaaagatgagacatcatcatgtgacaataatggagctttgaagaaaccaattgattacacacttgtgtggagcagcaagtcccaacagatcacgcaagacaaagatggctatatttggcta

SEQ ID NO: 22801 - DNA, 255 bp, Glycine max
  Clone ID: 701103109H1
agcggcttttcttaggcgcaaagtatgaagtgttgttgaaggtcgaatgcagtttatgcagggtagtcacaatgcacttcatgcaatgaagttcactgatagctcatatattggatcgggtctcgtataaaatcgttattcaatgtcggaatgagtagtttatggtgtatgactaatgagatttcgggttcaacagtagggggaatattatgtgaggaataagtatgcatgatagactgctgctgaataaatcaa

SEQ ID NO: 22802 - DNA, 266 bp, Glycine max
  Clone ID: 701103110H1
gaccccagaagtggtttctgcagctccaattcaatcttctacagcaagcgtaagcccctcccactccctcccaacaacgccttagacgtcaccaccttcatctcctcccgcgcccaccgcgccaccacagccttcgtcgacgccgccaccgcccgccgcctcacctacacccagctatggcgttccgtggagggcgtggcagcctctctctccgtggacatggggatccgaaagggcaacgtggtcctcatcctctcccccaactc

SEQ ID NO: 22803 - DNA, 253 bp, Glycine max
  Clone ID: 701103074H1
cgaaacaattttgatttgtgtcgaggaaaggacaggtcttagaacccttcttttcttcctcgtgtgcgtgaaaacgaagcaacgccacacgatggtgttctacttcaaagcgcgccctgaagccggcgatttcaccatcttcatgggcctcgacaagttcgagaacgaggaactcatcaaatacggttgtcccgaagacatctggttccatgttgataaaatgtcttcagcccatgtctatgtcaggctgcac

SEQ ID NO: 22804 - DNA, 266 bp, Glycine max
  Clone ID: 701103046H1
cacatcttaaccttgttcttaccagatggctgcctcagttaaactcttatttttgtcctttctctcgttgttcatctctttctccatagctcaaacctctttcagaccaaaggcacttgttcttcctgtaaccaaagatgtttctgcctcagttcctcagtatgtcacacaaatcaaacaaagaaccccacttgtggcagtgaaactaactgttgatcttggtggtggctacttgtgggtgaattgtgaaaagggctatgtctcat

SEQ ID NO: 22805 - DNA, 268 bp, Glycine max
  Clone ID: 701103047H1
cttgcatcaaaggtggatgcaatcaaggatagccttgataatgatcaagaaaaagttggagctgatattgtgaaaagagctctaagttaccctttgaaattaattgccaagaatgctggtgtcaatggtagtgttgtcagtgagaaggtattgtccagtgacaatccaagatatggatataatgctgccactggtaaatatgaagatttgatgtctgctgggatcattgatccaacaaaggtggtcagatgttgcctggagcatgcag

SEQ ID NO: 22806 - DNA, 266 bp, Glycine max
  Clone ID: 701103050H1
gcaaatccacattcctctccatgtccggagagccaccacggccgttggagatccacctgagggtcaactccaagagaggcggcaccaccatggtgcaccccgtggacacggcggttccggttcagtaccccagagatgaggagggagtgaagcattacagaaaatggtttgcttggctgatacctctctttgtggttgccaacgtcgctatggttgcgatcactatgtatgtcaataactgcccgcgtaactctgtctcctgcatt

SEQ ID NO: 22807 - DNA, 262 bp, Glycine max
  Clone ID: 701103051H1
aaaaaccgacacaaagatctagtcctagctagaatcaaacaggggcgatctcaccttcaagaacacatcgccatggcaaggaacttgcttcttgtgctttttgcagtagccaccctcctccatggctcagcagcccaaaccagacacatggtcggtgatgccacgggctggatcatccctgctggcggcgctgccacctacaccgcctgggcttccaacaaaaccttcaccgtaaacgacactctcgtgttcagcttcgcca

SEQ ID NO: 22808 - DNA, 261 bp, Glycine max
  Clone ID: 701103052H1
aattttgtcactgtaattcttcttcttcaaagaaaaccccaatttcgaacgcttcaaattcaattcaggaaaccctagtgattaatttcgttgcgaaacggcgattcaagattatcgtgagccagaagatggtagcggaagcggaaattatctgtcagcagaacattccgatgttggacgtgaagtatcatatttgcgtggctcaagaacacaacgtgaaggttgaggtttcacccaaatcaccttcacctcctgttccga

SEQ ID NO: 22809 - DNA, 264 bp, Glycine max
  Clone ID: 701103053H1
ctcgagccgctcgagccgtgtctgtggggtttgcaaaatgggaactcgaacaaatttctaccagaacccaccaatctcctacaaaaaacgtttaagcatctcctccgttcttcagaacctccatggtccattccctttcctctttcaaactctctctatctcattcgatgctctaacttaatcaattttcaaattccagcttacaacatcgccgccggcaatgttcctcccgccgatccaccgcaagcgacttccaccgccaat

SEQ ID NO: 22810 - DNA, 264 bp, Glycine max
  Clone ID: 701103054H1
gaaaataataattagtagcataataattaagccaaagtgttcatagatatggagggtcttctgcctcttgtttataaagcaatcaagagaaacaaaacacgaaggcaatacgagtgtctttcatcaggaacttctctagggtacaacatcagcatggccgagatgtaccctcaaactcaggaacatgtccttcagaaccagacacatgcccagaaagtgtttcaccaccaccataatgaaagtcacaaaattggtcacaggaga

SEQ ID NO: 22811 - DNA, 265 bp, Glycine max
  Clone ID: 701103056H1
gaaaaaaccgacacaaagatctagtcctagctagaatcaaacaggggcgatctcaccttcaagaacacatcgccatggcaaggaacttgcttcttgtgctttttgcagtagccaccctcctccatggctcagcagcccaaaccagacacatggtcggtgatgccacgggctggatcatccctgctggcggcgctgccacctacaccgcctgggcttccaacaaaaccttcaccgtaaacgacactctcgtgttcaacttcgccac

SEQ ID NO: 22812 - DNA, 260 bp, Glycine max
  Clone ID: 701103058H1
cttcctttgtaatagaaagcacgcgtttctctctctccctctctcaacgaatatttgtgtacttcctcttttgtgggtagattcaatttaccatgtcgagttcatcggaatactctcaattttccggccagaaaccggcgaggtcgccggagaaatcgagcttctctcagacttgtagcctgttgagtcaatacatcaaggagaagggtagcttcggagatcttaccctcggaatgacatcatgtgggtcacctgagaca

SEQ ID NO: 22813 - DNA, 262 bp, Glycine max
  Clone ID: 701103059H1
caaaggcagaagcgagatctcctagaaagcgagtttctcttttctctctctctttcaattttcacatagtcagcgaaaacaaacaaactattggagatttggagcacgaaacacaacacaagcagcagccacctcgtttcattgttttgaattcaactgagaaaaacgacaacgaggatgtttcaggagagcagcgtgacgcggtggccgactcagtggactcgctaccacgacaagctattcgagcgggcccttctggtcg

SEQ ID NO: 22814 - DNA, 264 bp, Glycine max
  Clone ID: 701103060H1
cctcgagccgaatcggctcgagggggagaaagggagaggcgcgaaactgagcggaggcacggacgaagaagaagggagcgagactcgtgatcgattgcgcgaagcggtggaggataagattatggacattgcttctctggagaagttccttcaggagaggattaaggtcggcggcaaggccggtgcactcggcgattccattaccgtcaccagggacaagagcaagatcaccgtcacctccgacagcaacttctctaaacggta

SEQ ID NO: 22815 - DNA, 264 bp, Glycine max
  Clone ID: 701103061H1
aattcgtacagtttcagcttaccgttaatgtggttgcattaatagtgaatttcacatcagcctgcttgacaggaactgcacccctcacagctgttcaactcttgtgggtgaacatgataatggacacactgggagcacttgctcttgctactgaacctccaaatgatgatttaatgaaacgttcacctgttggaaggaagggaaatttcatcagcaatgtcatgtggaggaacatcttaggacaatcattgtatcagtctatgg

SEQ ID NO: 22816 - DNA, 266 bp, Glycine max
  Clone ID: 701103062H1
catgatcttaagtcattatatttttagttagattgtttccctacatggtactgggagttatgtttaatttaagtgctaatgcctcttgggactctgatggttccacattttgaaagagatgatagataggtaagcaggatttacattacaattcattgtcttctgatacattggcctttttcaaattttgagggaactgagcaatgtaaagagtttctattattttcacctatgtgatatataccagagcaggcagtgcaaaacag

SEQ ID NO: 22817 - DNA, 269 bp, Glycine max
  Clone ID: 701103063H1
cagacttaacaacagcacaaagcgggttactgtctgttcaagctaccatctctctctctctttcttagtgcctccttgccagaagttaaaatggcccaagaaactttcctattcacatctgaatcagtgaacgaggggcaccccgacaagctctgtgaccagatctccgatgctgtgctcgatgcatgcttggagcaggaccctgacagcaaggttgcctgtgaaacctgcaccaagaccaacatggtgatggttttcggagagatcac

SEQ ID NO: 22818 - DNA, 248 bp, Glycine max
  Clone ID: 701103064H1
acgcaaccccctcttttagcgttcgaacaaaattagggttttctcaaccctagggtttaccttctcttcccctgttcgaaattaggcaaatcaaaacagaaacacgactacaaaaagaagaaaagaagaaaaagaatcaatcattcattgatcgctgaaacgatacgatgacagggaaggcgaaccggacgaagcacacggcgaaggagatcgcgtcgaaggtggacgcggcgaccacgaaccgcggc

SEQ ID NO: 22819 - DNA, 266 bp, Glycine max
  Clone ID: 701103065H1
gcctccttcagattggatggattgggagaagcgctattataacaagtatgactccatcatatgtgaagcagtgggagttttgcagtcccaattgatgaacaccaggccaagtttggctcttggggccatggctttggttgcaatcagtgttccaacttcttctgctgtgcttttgtttcatttggttgcattggccaaggttgttttggctggggctcatcttggctagctagactagaatattgttcattagatgctttgaattt

SEQ ID NO: 22820 - DNA, 265 bp, Glycine max
  Clone ID: 701103066H1
caatcgcgtaaactggggtgatggtgggagtgctttttctttgaaggatgcgaattcacaaggcaatcagtcaaccagagacataggtgttcagtttaatgctgttgagtttaaaaggtccactgaagaattgaaattgcgttattctaattctaacgaggaagcagttaataaaaccgcaaaaaagaagcggaaatcagaaccctatggcgaggaaccttctggtgaaaatgaagaggaggcaaaatgcgctataggttttatg

SEQ ID NO: 22821 - DNA, 261 bp, Glycine max
  Clone ID: 701103067H1
gcaaattcggactttgcaccatgttttgggtggtacacttaacccgaatgctgcatacctattcatcagaggcatgaaaacgctgcatctccgtgtacagcagcagaattcaacaggaatgaggatggccaaacttttagaggcacatcccaaggtgaagcgggtctactatccaggcttgccgagtcaccctgaacatgagcttgccaagaggcagatgactggtttcggtggtgttgtcagttttgagattgatggaga

SEQ ID NO: 22822 - DNA, 263 bp, Glycine max
  Clone ID: 701103068H1
tctaacctcatcactcctcacacaacacacttgcctcttctacctccctccacttctagttcttcccacatggaggatttaatcatatctccttcttcgtcttcctctttggtctctctaccccatgaaaacccaacaccaacaccaacccttctacaaaaactccaattcctcctccaaagccaacccgattggtgggtctacgccattttctggcaagcctcacacgacgacaatggcaacctctacttatccttcggaga

SEQ ID NO: 22823 - DNA, 260 bp, Glycine max
  Clone ID: 701103069H1
ctcgagccgtgctaactaaacactaccctgctgcaccaaagtgccaagtcacacgcacaacaattttcttttctttctctctcactctccaacttgcacccaacccaataataacaataacaaactcaacctcgccaggatccaacacaacgcactccttacacagaccaagattctcccccagtggtgcagttgaagggccgtgaggatgttagagaaagtggaggagtttaacatggataaagttatacaagagtttg

SEQ ID NO: 22824 - DNA, 262 bp, Glycine max
  Clone ID: 701103070H1
ctgtggagagcttgttttctcttgttcattcatctcacttccaatacaaggaacaagctttccaccaatttgaatcaccaatggctcgctctttctccaacctcaaggttctctctgctcttgtcgccgacgcattctccaacactctcaccaggcgtgggtacgcagtagcgacacaaagcgcaacaagaggaggagcagcctccatcagcggcaagtcaggggaagacaaggtactaggaggaggtgctgaaaaggtttc

SEQ ID NO: 22825 - DNA, 258 bp, Glycine max
  Clone ID: 701103071H1
gatctgctaacctggcttcagtctacattatcgaagacaattctatcgctggtgcttccatgcactcattcctaccaagtctgggagaaaattcttgagtacttccatttgcaaacacgagctcgagctcagcaattgcgcagagaactgcgtcgcacaatgcttgatgataagacgatgaaagagtttcttctgagaatcaaagcgatctgtgattcgcttaatggtgtcagagatccggtgtcacatcacgaacac

SEQ ID NO: 22826 - DNA, 260 bp, Glycine max
  Clone ID: 701103073H1
cacttaccagtatggctatccaacaatctctgttagacaggcctagaaaatctgtttccaaaactatctgcttaatcctttctatagctgctgtcatgatctcatcagcctttgttggttcttatctcatcaaatccacctccttcttcaaccaatcctctcctcaacatctctgtgatcatgcacttgatagggcaacatgtttaacccatgtctcagaagtggtacaaggtccgatcttgacccccacaaaagaccac

SEQ ID NO: 22827 - DNA, 263 bp, Glycine max
  Clone ID: 701103045H1
gcgaaagagtattattcaatattttggttgggttgaatcccggggttgaagcgttgcagacatcacggctattctaagagtgtctcgctccctcattcatgtccgatctgtacgacggaggacgggtagttgcgtaactgccgttaacccttcgccgcacggtgggcgtggtgctttgccttctgaaggtggtagcccttcagacttgctcttcctcgctggtggtggtttcttctagtttcttcactcttttcattactttt

SEQ ID NO: 22828 - DNA, 238 bp, Glycine max
  Clone ID: 701103010H1
gcttccttaagctccttagtgctgctccttgcagctctaattctatcccctcaagttcttgcaaactatgagaatcccccagtgtacaagcctcccactgagaaaccaccagttacataagcccccagttgagaagcctcctgtttacaaacctccagttgagaaccctccaatttataagccaccagtagagaagccaccagtgtacaagcccccagttgagaaacctccagtgtac

SEQ ID NO: 22829 - DNA, 267 bp, Glycine max
  Clone ID: 701103011H1
acagctcgagcggctcgagcaacatgcacagttacctgaagaagcaagagagcttgacaaggaggctagacagattgtaaaacgagacagaagaatctgttcgcaatcaagactttgagaaggccggagagctaagagatagagaaatggatcttaaggcgcagatatctgcacttatagaaaaaggcaaggagatgagtaacgcagaaagtgaggcaggagatgaaggtcccatggtcactgaagttgacatacaacatattgtct

SEQ ID NO: 22830 - DNA, 266 bp, Glycine max
  Clone ID: 701103012H1
caaaatacatgaaaatggaagcaactgagatcatattccttttgtcttttggtcaaaagagaagatatatggaatagcattagcttcttcaaatgaagaaaacaccagcccccagtttgcataaatctaaccaaagaaaaaagaatgttggattccaagatagaggtgcagccaatggtacacagagtcaccatgttgagagccattctgctctgacatatttcaagtcttccttcaagaaattttttacattgtttctctctggg

SEQ ID NO: 22831 - DNA, 268 bp, Glycine max
  Clone ID: 701103014H1
taggtgaagtgaagaagtgaatacttttcatattgcacttgtgtagttaagcttgatcacactacttaggcttagttgtattcctctctcttttatctgttaattgggtttttaagattcttcagatttcttcactttttctgtggtatttatattaaattaaaggagcgaatgagcgttttgtgtcttcttctgaattatgaagtcagaaaccgtttctgggtgtttgtgattccgaggaaactgtatctggttagcagtattagta

SEQ ID NO: 22832 - DNA, 237 bp, Glycine max
  Clone ID: 701103016H1
cggagatgggagtcaggtttgggaactggtttgagcaccggaaacctcagtgacactttcaagaaccaccaccacgcccaacccatcgacttcggctgaattccatttccctaattcccgcaaatgggtgctagggttcccgtgcagcactacactctcaactccccctcttccttcatcgacagccgtctccacgtcttcaacgccgtcgacgcccgagaccgcgcctccgccatc

SEQ ID NO: 22833 - DNA, 265 bp, Glycine max
  Clone ID: 701103018H1
caaaaattgctcggagggaggagcgattggcccaaggtcctggagaaaaagtatccgctgcacccagtgctacagctgctacagcatcacagccagcgcaagacccaaagaaatctaagaagtgatccacatattctgatattggcttgtagaatttttgggtctggcattttgagttgctgttctaaagtagttttgacgagttttgaggagtttgtgttggtttagacctttagtttttatttaagtatatgaacttataaca

SEQ ID NO: 22834 - DNA, 267 bp, Glycine max
  Clone ID: 701103019H1
gagctctgttgatgtataccgcaaagtgatttccttgaatctgtattgcaaagttattctgtaactcttaagtcccttttgatcaaaaaaccttttacaatcatctcactcatctcttccttgccttgaatcaatgggatccaatttctttgttgttgttccttgttatgtccgtcagatcagctgaagaaacccatccccagcttgtttcaagctcttcttttcaacttagcctctttaaacattttagttgtcattagtttctag

SEQ ID NO: 22835 - DNA, 266 bp, Glycine max
  Clone ID: 701103020H1
ggggaagagattctttaagtaagtggtttacttcatgcaaaatgattggacttgcagccgaacatggatactttctaaggtggagtaaagattctgaatgggaaaccagtcccttgtctcctgatcttgattggaagaagattgtggaacctgtcatgcagttgtatacagaggcaactgatggatctaatattgaaactaaggaaagtgctttggtctggcatcatcaatatgcagaccccgactttggctcatgccaaggcaaa

SEQ ID NO: 22836 - DNA, 265 bp, Glycine max
  Clone ID: 701103023H1
cagaagaagatggagaagtatcagatctggagcaggagaatagcgttggcagcgtttgcgtttgctctgctgttccaatcggcctcagcagacgacgtcgttgtgctctctgaagataacttcgagaaggaagttggtcaggacagaggagctctcgttgagttctatgctccttggtgtggacactgcaaaaagcttgctccagaatatgaaaagcttggtagcagcttcaagaaagccaaatctgttttaattggcaaggttg

SEQ ID NO: 22837 - DNA, 267 bp, Glycine max
  Clone ID: 701103024H1
tgacaacaaaatcctctctgcttccaacaacatctcaaccatgggtacttgggttcttcaacaagtgacctctattgattggaattggaaccatgaatcctacccagactttcgtgatttctctgttatacccttcttcgctctcttcttcccctcccttcgcttccttctcgacacgttcctattcgagcaagtggccagacgattgatttttggaaagggacacaagaagatggattttcaaacacttgagagaaaaaagaagat

SEQ ID NO: 22838 - DNA, 270 bp, Glycine max
  Clone ID: 701103026H1
ccctcgagccgattcggctcgagccgccttaagcctttgattcccaagctctcccttcctctaccattgcacagtgatcgttaccgatccatgacgacaccaccgtcttcctcctcagcttcgcaatcgcagttcgcctattcaaacccctcctcctcctcctcctacttccccgttccctttcaccttcagcaacccgcaaccactcactacgctgcgccctacgtcgccgccccctccgtgcaaatccccgctcctccagtcgtcggc

SEQ ID NO: 22839 - DNA, 264 bp, Glycine max
  Clone ID: 701103027H1
tttgaatctctctggctccaaaaatctaattaaaatgccatacattggagatgccctatatcttgagagtcttgatctcgaaggatgtatacaactcgaagagatcggtctgtccgttgttctttcacgaaagcttacttctctgaatttgagaaattgcaaaagtcttatcaagttgccacggtttggagaggatctaattcttaaaaatctagatctcgaaggatgtaaaaaactcagacacattgatccatccatcggtct

SEQ ID NO: 22840 - DNA, 262 bp, Glycine max
  Clone ID: 701103028H1
cagcacagcactcggaaatttctggcgatctctgcgttttcccctattttttctgaatctaacaacaaacattcctctggcaacaatcaatactattaataagagttccttccttcactctcacccaagccaaagaaaggaacaagaacaagaccaacaaagtaacgtgaaagagaaagagatggaggaaattgttccagtggtggatttccagaggctttcagaggaagaggagcgcaagaagctgagaaaaacatgtgag

SEQ ID NO: 22841 - DNA, 267 bp, Glycine max
  Clone ID: 701103029H1
caaacattataatttctattacatacattttgtagctaggatgagcaagttactactcattcgtgttgctgggttcgtggcaacctttgtcaccatggtgatgatgatggtgcccaaacgtgagtgcccaaaacataggtgatgacatcgtcacacaagacttcttcaacagcataatcagtcaggctgatgatggttgtgcagggaagaacttctactcacgagatgctttccttaatgctcacaattcctacaatgagtttggta

SEQ ID NO: 22842 - DNA, 270 bp, Glycine max
  Clone ID: 701103030H1
gcaaatagtccatagtgaaacttccaacctctcctcacctaacctaccattcatccaattcttcttccatattcccttattcccatgttgttttgatgtatgctcttctctctaaacatggtgctgcatcacagaaagcttttattgtttccaccaccaccaccaccactctgtagaagtgcctgtcctgagaaatttaatgaccctctacccccacctaactccccagatgattatttgacccaaagtcccaccaggaacatcaaaatc

SEQ ID NO: 22843 - DNA, 271 bp, Glycine max
  Clone ID: 701103031H1
ttctgttataacatctcttgtcattgcattgaggtttgagtattgagagcatttcaaaacgccatggctaacccaattccaattcgtccatggtctcgcttggcctctctaagatcttctcctgctccagagtcacatcctaaacctcacactgcagaaccttctctcaaaacaacaaacattttttctaatgacaacaatgaaagtgccaccaaatctctatcaccaacaccaccagatgttcacatcccaattcaacaaaacctcaaac

SEQ ID NO: 22844 - DNA, 271 bp, Glycine max
  Clone ID: 701103032H1
gaaactcttccgccatacctcacctcagatctacgtcgtcgtcgtcgatcttctgttcagaataataattttagatccctgatgcaacagaacaaggaatcttcttagattctttttctggaagaaagagaaaacacaagaagaaactcttcttctttagacccgtcttatatatttatatacagtctctgattgatcggttttttcggaacctctattttcactcaaatccacgcgcgctcttcgggcatggatttggacgatttccgat

SEQ ID NO: 22845 - DNA, 270 bp, Glycine max
  Clone ID: 701103034H1
taaacatcaatacccaccatctctatgtctctctctcccccatttactcttcctttgctttttattccttttcagttaaacttcttaattaaaaaaaatatctaagtaaggtcacaccttaccctctattagtgtttcagaaacatagaaaaactcaatgaccagttttatgttctcataaacagtcatatagctaggaaagctacactgggaacagatgtctccaattccaaagcagtttttaggttgatttcagaagcaagccacttt

SEQ ID NO: 22846 - DNA, 265 bp, Glycine max
  Clone ID: 701103036H1
cccaattccaaattcaagaaattttttaaacttgacatatctgctatcaccttttccgtttcttgcgattcgacgatggccgatcaaaagctttcagaaccggcgcttaaacgtgagcagcttgatgaattcgtgagtagtctatattttgaacaacgaattcttgaactccgacttcttcaagacctcgagaacaatgatgaatgtaggaaaaatgggagcgtgaaaaggttaaatgaccagagtgatgtctgtggatttagaa

SEQ ID NO: 22847 - DNA, 264 bp, Glycine max
  Clone ID: 701103037H1
gctatagctagaagtccctccaatccctctttgtctttgtgcttttctagttccttccaaaataccaacaaaagcaaagacaatgagttgccaagcatggcccgaacccatagttcgagtccaatccttagctgaaagtggcctaagttcaatcccttcacgctacattaggcctcactcccaaagaccctccaataccacttcttttccaactcctaaaccttttcaaactgatcatcatcatggtcatgatcagaaaacttc

SEQ ID NO: 22848 - DNA, 261 bp, Glycine max
  Clone ID: 701103038H1
cctgtctctctctctcggtctcgctcttcttctcatcaagcacagagttacagactcaccgatcttccgattctctttcgtcttggtttatgagctcgaaggagagacccactcttggtggcacgcggattaagacccgcaaacgaaatattgctgcgccgctggaccctgcagcattctcggatgcagtggtccagatttatttggataatgctggtgatctggaacttattgctaagagtattgaatcttcagacctta

SEQ ID NO: 22849 - DNA, 262 bp, Glycine max
  Clone ID: 701103039H1
cgaaatcaccttccgctttctctccattgttctctccgatccaagaccttactccaaccacagagaatggactcgcaggatagagtctcttatcacacatcaaattgaaatcattgccatacttcgtgaagatgaggaacaaaattccgacacacgtggcactgcaccaaccgctgatctcagcaggaacaatagcagcgagagcagaagctacagcgaggcaagcctgcttccgcggcttgccacgtggtacaaatccaag

SEQ ID NO: 22850 - DNA, 264 bp, Glycine max
  Clone ID: 701103040H1
ctagaactcacaaaggacagaagaaacgcgaatgccaggagaactccaattaccacccgggttcagattccaccccactgacgatgagcttgtgaatcactacttgtgtagaaagtgtgctgcacaaaccattgctgttcccatcatcaaagaaatcgatttgtacaagtttgatccatggcagcttccagagatggctctttacggtgagaaagagtggtactttttctctcctcgagaccgaaaatacccaaacggttcgag

SEQ ID NO: 22851 - DNA, 266 bp, Glycine max
  Clone ID: 701103009H1
gtccttctgagcgccaattactagtgagtgagatgcttgggaccaccgatgaaaatgagcctcttcaggcgatgatgaaagatcaatttgcaaattacgttgtacaaaaggtgctggaaacttgtgatgatcaacaacgtgagctgattctttcccgaattaaggttcatttgaatgcattgaaaaagtacacctatggaaaacacatcgtcacgcgtgtagaaaaacgtgttgctgctggagacaggagaatagctgctcaggct

SEQ ID NO: 22852 - DNA, 253 bp, Glycine max
  Clone ID: 701102978H1
gcgcacagcacccaaccgtgaagagagactccatggccgagtgcaccgtccccaagtgggcccaaaaaaccgtcagcttgccccctctccggcgcggctgtcatcttgtcacttccaagatagtgaaggaaattgagcaagacctctccggcttcaagtgtggcctagctcatctcttcttgcagcacaccagtgcttctcttaccatcaatgagaattatgactcagatgttcgcgaggataccgaaacctt

SEQ ID NO: 22853 - DNA, 137 bp, Glycine max
  Clone ID: 701102979H1
atcctatctctttgcatattctttcttatcatcatcttcttctctcttgcctccagaattgaaaagttcttcctctgcccatagtctttgacacccttttccaatctctagtttttttattgggcttccgctctata

SEQ ID NO: 22854 - DNA, 258 bp, Glycine max
  Clone ID: 701102980H1
cgggcagtagccgagattccgtgagttgcaaaaatgaagacgattctttccaccgagaccatgaacatcccggacggcgtgagcatcaaagttcatgccaaggtcatcgaagttgagggcccccgcggaaaattggtgcgagacttcaagcatttgaatctcgattttcagctcattactgacgaaaacggtaaaagaaagctgaaaatcgacgcgtggtttggttctcggaaaacatccgccgccattcgcaccgcc

SEQ ID NO: 22855 - DNA, 262 bp, Glycine max
  Clone ID: 701102981H1
gccggccacttggcttggtccctaagggaacaaggcatgtgatggagaaagaagtagtcactccaatccaaaatggcccctttgttcactcccaacctgcttccatacccttcataagtgaggggtgtattggcatacacctctttcacctcaagtggctgctgaaagaactccctccacacctccctcgcccccttcatcaactcatggctcaccccatggttcaccacctgaaaaaaaccccattcccggcatgcctccg

SEQ ID NO: 22856 - DNA, 258 bp, Glycine max
  Clone ID: 701102982H1
gcaaaggggattcaaggtatgcaggaagggatgcaggggtagttactgttgaaggaataacagcggttttggagggtccagctagccttctagcagtatacgctatagctactgggaagtcatatagctacatacttcagtttgccatttctttgggccagctatacggaactgctgtttattatataacagcaatcttggaaggtgataatttttctacaaactcgttttactattatgcatactacattggagcaa

SEQ ID NO: 22857 - DNA, 258 bp, Glycine max
  Clone ID: 701102983H1
cggcgggaacgccgttttgaccctgacctccggtccagccaccgtaaccctgaacgaaacaggggaacaatactacatttgctcctttggatcacactgttccggcggtcagaagctggcaattaacgttaacagagcttcttctagcactccttcccctgctcctgaagcacaagcaccagcaccaaaagccactagccccatttctccaccaaggtctacaccagcacctggcccttcctctggatcagttactta

SEQ ID NO: 22858 - DNA, 257 bp, Glycine max
  Clone ID: 701102984H1
actttattgagtctttaacaagagttatgcaaaaggggttctttgaatcacgcgcttatgcagtgttcttgttaaaatccatgtccgaagtggctgagccagtgcaattattgcatctaagacaagacctttttgtcgaactagtacaagtcttcaaggatcaaatttctcaaaagacatcaaaagcaacacttcaaaccctgatccaattctctccttgggggaggaacaggatcaaagctgtggaagcaggtacc

SEQ ID NO: 22859 - DNA, 254 bp, Glycine max
  Clone ID: 701102985H1
cgtgttccatgccactatcaagacaacaatcgaccaagcgtatctggagttttatataagacacaaggatggcaccccaattagttcagaaccagagcgacaccgtgtgattcaatgcttgcaagctgcagtggagagaagggcatttgagggtgttaggctagagttatgcaccgaagacagacaaggacttcttgcagaagtgatgagaactttccgagaaaatgggctgaatgtgacaagggcagagatat

SEQ ID NO: 22860 - DNA, 252 bp, Glycine max
  Clone ID: 701102987H1
cctagacagggctattgaagcagaagatagaaagcatggagatttcctaagattggatcatgttgagggatatcttgaattgtcagcaaagacaaagacatactttgccactgctgttaacttatgggatgctgacttctatattaaagtcgacgacgatgttcatgtaaatatagcgacactgggacaaactctagtgagacaccgatcaaaaccgcgtgcctacattgcatgcatgaaatctgggcctgt

SEQ ID NO: 22861 - DNA, 250 bp, Glycine max
  Clone ID: 701102988H1
tgattctgtttttaacattctagtaagcttcatttgtcttgtagtaaattattcttacgcctgctgcatttttttataggccttgcgtctgctgcattgtgtcatcattactcaaacctccttatagactgtttacttggaacttctttaagatattggtttaagcatgtgaatgatttctatatgcagactagttgccaatgaacaaagatagtgggttaaaagactttacactacaatttaagtagca

SEQ ID NO: 22862 - DNA, 252 bp, Glycine max
  Clone ID: 701102989H1
tcgtggcttccagggtcataaagaatggcttgctgaggttcaatttctcggcattgttaatcacccaaatttggttaaacttttgggatactgctctgtggatggagaaagaggaatccaacggctgttagtgtatgagttcatgcccaacaggagcttggaggatcaccttttcaacaaaaaattgccaaccctgccttggaaaacacgattggagatcatgcttggtgctgcacaaggattagcttatct

SEQ ID NO: 22863 - DNA, 251 bp, Glycine max
  unsure at all n locations
  Clone ID: 701102990H1
cactcgagccgaatcggctcgagcggctcgagggactttaggttgggacctgggaattagggtacttcgcgtggcgaagatgaatgaggtggacttgaacgatcgattggggaagaaggtgcgcgtgaagtgcaacancgatgataccatcggcgacctgaagaagcttgtcgcggctcagactggcacaagagccgacaagatccgcatccagaagtggtacaccatctacacggatcacatcactctca

SEQ ID NO: 22864 - DNA, 251 bp, Glycine max
  Clone ID: 701102991H1
cttctcataagctctacttagcaaatcaaaatggcactttcttcttacatcttcaacatccatatttgctttagctttgttcactactcttttgcttataggaagttcttcagctcaactctctgagaacttctatgatagtaaatgtcccaaggttttctatgccgtaaaatccgttcttcaatctgctttggctaaagaacctcgccagggagcatctatcgttcgcctcttctttcatgactgctttg

SEQ ID NO: 22865 - DNA, 250 bp, Glycine max
  Clone ID: 701102992H1
ggctgggtcttgctctgaatttctctgtgttttactatgagattcttaactctcctgatcgtgcatgcagccttgcaaaacaggcttttgatgaggctattgctgaattggatacgttgggagaggaatcatacaaggatagcactttgatcatgcaacttcttcgtgataaccttaccctctggacctctgacatgcaggatgatggtgcagatgaaattaaagaagccgcacccaaaggtgacgggga

SEQ ID NO: 22866 - DNA, 252 bp, Glycine max
  Clone ID: 701102993H1
gaagaaacttaatcgatcatcacttcacttcactaatacatcatggcagacgagacccagaacaagtatgagagctctgaggttgaggtccaggatcgtggtgtttttgactttctcggtaagaaaaaggatgaagaagacaagcctcatcctcaggaggaggtcatcgccaccgagtttcaaaaagtcactgtctcagaccaaggagagaacaagcacagcctcttagaaaagcttcaccgatctgacagc

SEQ ID NO: 22867 - DNA, 252 bp, Glycine max
  Clone ID: 701102994H1
ggctttgttaattttctgacttaccctcttcacatttgtgtgcaatgttagaggacattgaatcatctactactcggctttgtaaaatgggattcggtcgaaattcgacctcaagaagcggagattacttggaaggaatgcttaacgactatgttggaggaaggataaaactgaaggctcagaagagcgtcgccacaacaacgaagtttgtggcagtgctcacgtgccttcagtttttctatgcagtctatg

SEQ ID NO: 22868 - DNA, 256 bp, Glycine max
  Clone ID: 701102995H1
cctcgagccgaatcggctcgaggtgattcagcatcctgggaacaagaccgagagggtttattgactcgctaagcgcacacgaggactatgaactcgaatcctggtcactatgttgcgcttgtcgtgtcctcgcccacgcttatggccgagaatggcacgccgatgaagcagcttaagcttctccgaccagacgatactttgcatattggccaggtttatcgcttgatcacgttcgaagctgtgttgaaggagtctg

SEQ ID NO: 22869 - DNA, 258 bp, Glycine max
  Clone ID: 701102996H1
ccgcatagatcataacaagagagggcttcctctctttaatgtggttccttcttcctgcctgccaatccttttccttatgttttagtcgttttagtcagtaaggccgagtttcataatatggtgtcaactgcatagttaaccttattcatgcaacacacctggacttaaattacagaggtacttacatttacctcattccaacgagatgagtaagggttcaaatccacgacatgttacacgcgagatcctatcttgttt

SEQ ID NO: 22870 - DNA, 272 bp, Glycine max
  Clone ID: 701103001H1
ctcgagccgttcgtttggcatgacttgtcggagaacgatttcatctacccgacgacgcaaacgcaagactacattctcaaaggatcggaaattgtggagcacaatgttaccggcgccggcgcgagggttaacaaatcggaggaagaatccgattcgccggtggtgatcacgaggcggcggaaccagtcgtggagctcaatcgatatgaacgagtaccgagtttacaagtccgaatcgttcggtgactcggctgggagaatcggcgccgacgc

SEQ ID NO: 22871 - DNA, 244 bp, Glycine max
  Clone ID: 701103002H1
cctcgagccgagccgaatcggctcgagcaaacacacaagccaaacacaaacacaacaacacacagaacaacagagcacaaacagactaattccaacggttgaattttttggctgaagacaccccaccgacgttagtcaaataaaacatgtcttgctccgtcgcggttaccaattacgccggtgttctctcctacttcttccctctactgctcgtagccctccatcatctccacttcgccggaat

SEQ ID NO: 22872 - DNA, 263 bp, Glycine max
  Clone ID: 701103003H1
agactctagttatatcacaaatgggtatttggagactaccatcgattggataccaggaattaaggaaattcggttgaaggatcttcccagcttcattagaaccacaaatccagatgagttcatgcttgatttcatacagtgggagtgtgggaggactcgaagagcttctgcactaatcttgaacacctttgatgccttagagcacgacgttttggaagcgatctcgtccattttgcctccggtttattccattggccctttga

SEQ ID NO: 22873 - DNA, 262 bp, Glycine max
  Clone ID: 701103006H1
caacatttctatgttcctgttgcacaccatgctgctgccgttcattttgttgtgaaggacagtgatgtggtgggttcacagctcattggcgttgtggcaattcctgtggaaaaaatatactcagggcaaaacgtacaagggacctaccctatcctgaacagcaatggtaagccttgtaagccaggtgctgttttgatggtatccattcagtacattccaatgcatacacttatcatgtattaccaaggagttggagctggtc

SEQ ID NO: 22874 - DNA, 265 bp, Glycine max
  Clone ID: 701103007H1
gtgaacacaaagctggagagtaccatggtgagcacaagccagagcacaaagaggggttcctagacaaagtcaaggacaagatccatggtgagggcggcgccgccgagggcgagaagaagaagaaggagaagaagaagaaggagcatggccatgagcatggccatgacagcagccgcagcagtgacagtgcttaaactgctgcatcacctatatatttaacaggtttatgggcccatagtagcgagggctgtgccttaatttctct

SEQ ID NO: 22875 - DNA, 266 bp, Glycine max
  Clone ID: 701103008H1
tgttggtaaagaaagaaagagaagagaagaatcgaagacgaagatggaggacgcatcagcatcaaagttcattccacaccaaatcggaggggtccaaaacgacgcgcttcgattcggtctccatggagtcaagagcgacatcgttggttctcaccctcttcaatcttcactccaatctacaaggagaatggatgaagcgatgaagaggcaatgcaaagttaacctgtacggaactgcttttcccatgaaggaggagcttgacaggc

SEQ ID NO: 22876 - DNA, 250 bp, Glycine max
  Clone ID: 701102977H1
gctgcctcatattagagaaaggaaggttgtgtatgtggaagatattgctgaaggtcttgagaatggtcctgcagccttggttggcctctatagtggtcgcaatgttggtaaacaagtggttgttgttgctcgtgactgaatgcagatgctttcgttggacattgctgtcttgttttatgattttggtgttgaatattcagggcgctttgtatgtttttggcaatcatttgcaattgtggtattggtgata

SEQ ID NO: 22877 - DNA, 262 bp, Glycine max
  Clone ID: 701102950H1
tgaatatgcaatcgaagccatcaagctgggatcaactgcgattggattgaagacgaaagagggtgttgtccttgcagttgaaaagcgcatcacttcaccactgctggagccaagtagtgttgagaaaattatggaaattgatgagcacataggatgtgcaatgagtggattgattgctgatgctcgaacacttgttgagcatgcacgggttgaaactcagaatcataggttctcctatggtgaaccaatgactgttgagtcc

SEQ ID NO: 22878 - DNA, 245 bp, Glycine max
  Clone ID: 701102951H1
aatttctcgatgatagatgaattacaagaataacataggttgtcgcaacagggagattcacgaaaagcaacacgagtcatggtcggaagccgagaggacgggaagccggatcaggatagtgggcttcagtgggcctctgagcggaccactgagcgggcctttgagtgggcctttggtgtcttctaactaaagacccagcagcaagaatataagtgcgaggttcaaggacgacgaggagattgtgg

SEQ ID NO: 22879 - DNA, 259 bp, Glycine max
  Clone ID: 701102952H1
ctccctcgctcaataatacaaaacaaaaaagaagaagaagaaggtcttcgcgatggcatcgaaacggatcttgaaggaactcaaggatctccagaaggatcctcctacctcttgcagcgccggtcctgttgctgaagacatgtttcactggcaagcaacaattatgggtcctccagacagtccttatgctggaggtgttttcctagtcactattcatttccctccagattatcccttcaagccacccaaggttgcattc

SEQ ID NO: 22880 - DNA, 256 bp, Glycine max
  Clone ID: 701102953H1
cagagccaaggtaggttaaacactcttcttcatcgtcgtcgcaatgggacgtgtgatccgtgcgcacgtaagggagcaggctcggtcttcaagtcccacacgcaccaccgcaagggccctgcccgcttccggagcctggatttcggagagcgcaacggctacctgaagggtgtcgtcactgacgtcatccacgatcctggccgtggcgcgcctctcgctaaggtcgccttccgccacccgttccgctacaagaagc

SEQ ID NO: 22881 - DNA, 255 bp, Glycine max
  Clone ID: 701102954H1
ggcgacgccaccctcctcatccacgagggcgtcaaggccgaggagctctatgagaagaccggggaactccccgaccctaactccactgacaacgccgagctccagatcgtgcttaccatcatcagagatgggttgaagaccgatcccaccaggtaccgcaagatgaaggagcgtctcgttggggtttctgaggaaaccaccactggtgttaagaggctatatcagatgcaggcgaatgggactctactcttccct

SEQ ID NO: 22882 - DNA, 254 bp, Glycine max
  Clone ID: 701102957H1
cttcgttatcttttctcagactccgcggcgtagatccgaggagttcgggaaatcctaactcatcatctcaactcaagtcatggctggacttgcacctgagggatcacagttcgatgctcgtcaatatgattctaaaatgagtgacttactttcatctgatggacaggacttcttcacatcctatgacgaggtttatgatagttttgacgctatgggtttgcaggaaaatcttctcaggggaatttacgcatatg

SEQ ID NO: 22883 - DNA, 253 bp, Glycine max
  Clone ID: 701102958H1
atcttctgcctactgctaggtgaaatgcagaatccagatgcaaatcaacttcccgaagttgattcgttgccagatgggtttgttgagagtactacagagcctcttgctcctgcaactccatctcctgaacaagagaaacccctgaatagttacaaggatgatggcccctctgaccttattcattctaatgaacgatcaaatgatttgggagaaaaagagtttcaaaacaatcatgactgctcagcggagagtc

SEQ ID NO: 22884 - DNA, 255 bp, Glycine max
  Clone ID: 701102959H1
taatttgtccgaagatggaaaagatttcattgaaaaatgtttcattaaggatcctaagaagaggtggagcgcagaaatgctattgaaacacccttttctactcaacgatgacactgtttcatttaagcgcgtctcatgagtcgcccagaagccactttgatttccccgattgggtttctagcgtggcgaattcgcttcccagttcgccggaatttcaagaaaagtggggttttgatgatgagttctgttcgccgg

SEQ ID NO: 22885 - DNA, 242 bp, Glycine max
  Clone ID: 701102960H1
aaaagatgaaatcctctctgatcttgttatttatgatctgtggtggagtgattgcaactcctccagaggatccaattccgtgttcttcaaagaacacagactgcaccatcacagacacctatggcgtctttccggaccgaagcatttgccacgccggtgaggttatgtacccaaacatagaggaggagttcttatccgtggtggcctcagcttcgaagaagacaagaagagtcaccgccgcc

SEQ ID NO: 22886 - DNA, 267 bp, Glycine max
  Clone ID: 701102961H1
tgacttgagagttggcaatcgctccattattattccctacacaggcaatgagattatgttattgtgtgcaaaggaaggcaaactatggtgtacgtttctctattcccccaccctaagatctgttgtatgaagggggcctacaaaatgaatacttcaaattcaaagatgtatgtcagatattaggtgttagagtaggcatggctattcattgattcaagccatacgttttacacattaaatttgttggatacatgctttatgtgatga

SEQ ID NO: 22887 - DNA, 257 bp, Glycine max
  Clone ID: 701102962H1
ctcctctgtaacttcaaaacatacacctcttctctctgtttctcttcactctctctctccctccctcttcaactaacatggcaattgaaaaccaagacaccgctgtcagagaaatcaagcccaagaacaggagaatcatgggtgctggagggcctgatgatgaggacaataggtggccaccgtggttgaagccactgctgaaagagagcttctttgttcaatgcaagtcgcatgctgattctcacaagagcgaatgc

SEQ ID NO: 22888 - DNA, 259 bp, Glycine max
  Clone ID: 701102964H1
gaagaaccaacaagaggggtattgagattgagattcaagtaatggggaagagcaaggttcttgtggtggggggaactgggtacatagggaggaggatagtgagggcaagcctggcactgggccatgagacctatgtggttcagaggccagagttgagcctccagatagagaagctgcagaggctcctctccttcaagaagcaaggtgctcatctcattgaggcctctttcaatgatcacaagagccttgttgatgctgt

SEQ ID NO: 22889 - DNA, 264 bp, Glycine max
  Clone ID: 701102965H1
aaccgtcatcataaattcatatatcatcagcctcagccatgtcttcttcgctcttgcacctcctcttccttccacaactacgatcttcgatagtgctttctcagattcttccttcgtggtaaccggtcgaatcatggagcccatggacattgttggcaagtcaaaggcagacgcttcgcttcctaaagctacaatgacaaatattattaaagagatgttacccccagatgtacgttttgcaagagatgcccaagatctattgat

SEQ ID NO: 22890 - DNA, 260 bp, Glycine max
  Clone ID: 701102966H1
gttgttggaaattctatgccagtgtgctgagggaagagcagaacttttgaatcatgcagcaggtcttgccattgtgtccaaaaagattctaagggtttcgactttggccaatgatagagctgttaagattcttctgtctgtttcgagattctctgcgactccacatgttgttcaagaaatgcttaaacttggtgtggtcgcgaaattgtgcttggtgcttcaggtggatagtggaaacaaggctaaggaaaaggcaagag

SEQ ID NO: 22891 - DNA, 258 bp, Glycine max
  Clone ID: 701102967H1
caaacattttccatggctcttctaatccactccccggaaatgtccgttgccccccaaatttctcaaaaccctaaccctaagctgagcaaactccacagcttcaaaccctaccccaagggcaaagcgattgggtcaacgcgcggtgtgagaatttcctgcaaggtgaaagattgtgtggttttggatgagaacgtgaattcgtacggtcaattttcggttccggtgaagcaagggtcgaagcagagcaaagaggaggag

SEQ ID NO: 22892 - DNA, 257 bp, Glycine max
  Clone ID: 701102968H1
cccaaatcgtagatctacggttaaattggtgtagtgtggtaagatgggaggaggatttagagtgcttcacttagttaggccatttctctcgtttcttcctgaagttcaaactgctgacaggaaagtgccatttagagagaaggtcatatacactgtgatctctcttttcattttcctggtttgtagtcagctccctctatatgggatacactcaacaacatgtgctgatccattctattggatgcgtgtcattctcg

SEQ ID NO: 22893 - DNA, 256 bp, Glycine max
  Clone ID: 701102969H1
aacctatgagaattcattatgcaaaaacaaagtcagactgtattgcaaaagaagagggtagttttgttccaagggaaaagaagaagaaacaagaggagaaagctgaaagaaagcggcgtgttgaggaagcacagcaatctggtgtggctaatggaacacatagtgcaagtaatggtggtccaactgcatcattccgtcaaggacccggtgctcaagaagcagctgctcctaacaatattttgttcatagagaatct

SEQ ID NO: 22894 - DNA, 252 bp, Glycine max
  Clone ID: 701102970H1
ctcttcttctacattagtccttgttattcattattcattctcagcctcttttcttctggggggcaaaaggggtcacttttcagatccgagattgagctcctttacccatcatcatcatggagctcctcgggtacctgaatcagggtcacccttctagaggaacaagacttgttattactctttcattggtgctttcgacacttgtgtccttctccactttcacacatgccttctctccttctgcgtttccgg

SEQ ID NO: 22895 - DNA, 249 bp, Glycine max
  Clone ID: 701102971H1
cctctcctcgccgtcatcgccgcagcattggccaccatcagtttctccggctacgtgttgcagaatggagtcaaatcaggcagcttcttctatggaagttgagactgtcccatctgaagccaaacttttgccaccaaagccaaagtttgagcctttgaagcctcatgagatgtctgatggtcaggtacagttccgcaaggtgaatgttccacctcatcgttacagccctctcaagaaagcttggatgga

SEQ ID NO: 22896 - DNA, 250 bp, Glycine max
  Clone ID: 701102972H1
gaggcctgtgcggtgctctgagaggaggggccatagtttgggaccctttgaaccctaatctccacccaaacccattttcccgggaagttccctctgaaacgaagacgaaaatgcagaatcacaggctgaagcagcagcaacaagctctgatgcagcaagctcttctccaacaacagtctctctaccaccctggtctccttgctcctcctcagattgaaccaattccaagtggaaatctgcctcctggttt

SEQ ID NO: 22897 - DNA, 251 bp, Glycine max
  Clone ID: 701102973H1
attccatgtgaggagagccagtgttctgatagcttgaccactactgatactgaaaatcttagttctgaagcaggtgttcagattgtggagagcttctcagcatgcagtgttgaatctgtccaacctcctaaggctgattctccacccagcagtgtgtcaacaaatggggtttcatctccttcagtggctgcaagctcagactcatctgatgttgctgcttccaagtctcccagtcaggaacaagtttcagc

SEQ ID NO: 22898 - DNA, 252 bp, Glycine max
  Clone ID: 701102974H1
ccggaacgcagaggtcatcagaaaaatggccatcggagagattccggctaccaatatcagggacggtattggggtcggagccagagaaggaggaggagttgcagctgtggacggtggtggtgacgaatttgctcacccagaatgtgtccatgtccaagacacaagtagttcaccctccacccaaccccttttacttgtaatttgtggaaaggaaaagggattgactgaactctaccgagaggattcgtaaca

SEQ ID NO: 22899 - DNA, 252 bp, Glycine max
  Clone ID: 701102975H1
ctcagcagaataatggatcctagacttgaaggccaatattctgaaatggggacaaaaaaagcagcagcattggcttaccaatgcctcagccacagaccaaggagcagaccctcaatgagcacagtggtccagacccttgagccactccaagattttgatgacattccaattggaacatttgtttacacagctccaccggataatactgaaatgcatagtgcaaaggctcaatgtgagacacctaagaggagg

SEQ ID NO: 22900 - DNA, 250 bp, Glycine max
  Clone ID: 701102976H1
actacaccaaagtactccaaggccaggtatgatgaaattgtgaaggaagtttcttcctatttgaagaaagtaggatacaaccctgacaagattccttttgttcctatatctggttttgagggagacaacatgattgagaggtccacaaaccttgactggtacaagggtcctactctgctagatgcacttgaccagatctctgagcccaagaggccttctgacaagcccctcaggctaccccttcaggatg

SEQ ID NO: 22901 - DNA, 266 bp, Glycine max
  Clone ID: 701102949H1
attttgcaactgctcgcagcttaacgctgcaatttctttccaagttgatcgagcgacttcaggattgccttgcatacttttggtgtttgaagagctaatctgtctaccaaaatgaagggacgtgtaaggtgggatgaggctaatattggagaaattgaggcaaacaaacctgtgaggcagaaaattactgagcctaagactccatatcatcctatgattgatgatgacagttctctatctcctgtacgaggaagttttgatgcatg

SEQ ID NO: 22902 - DNA, 260 bp, Glycine max
  Clone ID: 701102919H1
gtttcgaatagattatcctaagtctttgggaatagtgctgcaatggcttcaagtcaggaggaggtgacccttttgggagctactggaagcccatttgtgtgcagggttcatattgccctcaagttgaagggagttcaatacaaatatgtcgaagaaaatttgaggaacaagagtgaactgcttctcaaatccaacccagttcacaagaaggttccagtgtttattcacaatgagaagcccatagcagagtctcttgtgat

SEQ ID NO: 22903 - DNA, 261 bp, Glycine max
  Clone ID: 701102920H1
ttgcaacaagttcgacatccatttgtgcagtatgataatgcttttaatcagttgagtcagatgtcacaaaatcaagcttcacttggctatggacctcaaccaagccctatgatgaatccttttggtgtcacagggttgaatcaggtgcctagggatgctgcttatgtacagtggccaagtgctgcagtaatgtatgcacattcatatgaccaatttagacaagctgttttccaggctccatttggtcaacgcccattgagt

SEQ ID NO: 22904 - DNA, 252 bp, Glycine max
  Clone ID: 701102922H1
ccaacttccaaaccctaaaagtctacgcttttaattttctgttgtcttctctctcaaatcggtgctcccttcggcggcgcgtgagggtttccagcggcgcgtgacggtcgttattcgcgcgtcattccaagttccccgctgacctatgctttcgtcgacccacattggatagttcacgccggagagaaggcggaatctcactggacggccgtcatttggcacctccatggcttccgccgtccttgctaatcg

SEQ ID NO: 22905 - DNA, 257 bp, Glycine max
  Clone ID: 701102923H1
cggctcgagctcgagcgattcggctcgagtagtcattcctgtttcatatacttcattacattactcacacagtaatcacttgctgcattttctttcctcactcttcacccttgagaatttgtcattccgacatggaacttagttttaagcaccattttggccttgcttgtgtcttactacttttagctgctctgtgtagctcacaggactctttcactgactcgagcccaacatatcatggtagccctgattgctat

SEQ ID NO: 22906 - DNA, 255 bp, Glycine max
  Clone ID: 701102924H1
gcattggcaaggcctgcgtcttacacgaccaagtattttggttgtgaacttggggcccagtcaaaatttgatgagaagaccggcacttctcacgtcaatggagcacatgatactgttaagcttgctggccttcttgagaacttcattaagaaatatgttcagtgttatggttgtggaaatcctgaaactgagatcataatcactaagaaccaaatgatccagctgaaatgcgctgcttgtggttttgtgtctgat

SEQ ID NO: 22907 - DNA, 255 bp, Glycine max
  Clone ID: 701102925H1
cttcaatttgctttgtgctcactcatctatctattataaccaaacactcttcttcatattcttcttcttcttcttgttcttgttctatctgtgacgagcatcatggcctcgagagcagtgctattgttggctatgtgtgtgcttccggccatggttgtggccattcgcccagcaaagaaccctttttgcgtgaagggtcgcgtctactgtgacccttgccgtgctggttttgagacctcagcaaccacctacatt

SEQ ID NO: 22908 - DNA, 235 bp, Glycine max
  Clone ID: 701102926H1
cacaatctaaaactcccgttttctctctctgtttttccatgggcatctgatcaaacttttcttaattctctctctcagtgtttgctattctgagtgatgggtatgcccttccgctgttcccacacctcgcatatcagtgacatcatcatcaccagcttcttgcggcacaagtctgaaattacaacaatttccctcaattattgatccagcggccatcttaatagccttgtccaat

SEQ ID NO: 22909 - DNA, 252 bp, Glycine max
  Clone ID: 701102927H1
agccacgtctgcatcacgatttgactcaagtctcaattgaagccaattgcttattttcgacgtggatcatctcggatggacttggatctcttctgtcacttcacgacaccgactttcctcacgacactcgtcaccctcgcgcgcatctcctcgcgctacttcatttcatacttttaatcggcacagatttctatcgcgcatttctgggtcagcatcattagcgcgcgtcaatttctttcatctgttcttgcg

SEQ ID NO: 22910 - DNA, 237 bp, Glycine max
  Clone ID: 701102928H1
cggctcgagtgtagtgagggactcatggattgcgcggccacagatagcttcagtgggttcgtgttgtcttctgggagcgatttcaaagggagttctttatgtggctaatctcggggattcgagggcggttttgggtaggaaagcgttggaaggagaggtgaattgtggtgctgtggtggcctagcgtttgtccactgatcataatgttggggtggacgaggttaaaaaggaggttga

SEQ ID NO: 22911 - DNA, 257 bp, Glycine max
  Clone ID: 701102930H1
catttacacaaaatcatcaatggcaatggcctctcttgcatcctcaagtgttcttttgaacctcttgttcatcgtttctgcgctccatttgggagcagcagcagcaagaattctgagtgaaaaggaggaccaacaacagttgcagttccaataccacaaaggccctcttctcagcggcaatatctctgtcaatctcatatggtacggtagcttcaagccttcccagcgagccatcatctccgatttcatcacctccc

SEQ ID NO: 22912 - DNA, 265 bp, Glycine max
  Clone ID: 701102933H1
aagcaatccagggttgcgggcagaacttattcattcagttaaagagaaacttaatctaatttgtggatgcgctttcatgacatatccttctgcatttgcttctgtatctattggcagatcaaagtggaatggaaatgttgggaactcgggtctggttctaagagttgatgttcctctctccaccgttgggcgcccttccttctccattcagataaatagtggcattgagttttgatagcattctagtgtttggtatcatcagttt

SEQ ID NO: 22913 - DNA, 251 bp, Glycine max
  Clone ID: 701102935H1
ttccgttggtgccattcgtgcagcaccggatcctctcatttctccggcgataactctcccttttccggcgaattcaccgcttcctcgatatgaatcccgagtatgactatctgttcaagctccttctgattggagactctggtgttggtaaatcatgccttcttctaagatttgctgatgattcatacattgagagctacataagcaccatcggagttgattttaaaattcgcactgttgagccggatggg

SEQ ID NO: 22914 - DNA, 199 bp, Glycine max
  Clone ID: 701102936H1
aaaaacaccaattctccaccctctcattgaaaaaaaaaacaaccaaacaaaaaaaatcaatcattttattttatttttctacgaaaatggttgatttacattggaaatcaaagatgcctagttccaaaacaccaaaactctctctctccgacaacaagtccttaccctctttgcaactacccttccgcaccacagatat

SEQ ID NO: 22915 - DNA, 255 bp, Glycine max
  Clone ID: 701102937H1
cgaacccaaaccgaaaccctaaccctaacggagagatggcggacacttggcatcgatattcgggacggagaaggacatggtgaactgtccgttctacttcaagatcggcgcgtgcaggcacggcgaccggtgctcccggcttcacaccaagccgacaattagcccaacattggttctgtcgaacatgtaccagaggcccgacatgaacatgagcattatcaccaaccccgatcagccacaaccccaatcccttga

SEQ ID NO: 22916 - DNA, 256 bp, Glycine max
  Clone ID: 701102938H1
gaagagttgaatcctttcaagaatcaccagaacatgttagctggcatagactatattgttgcacttcagagtgatgtatttctctatacttatgatggaaatatggcaaaggcagtacaaggccataggcacttcgaaaacttcaagaagactatcaatccagacaaggtaaattttgttaaactcgttgataagttggatgaaggaaaaatttcttggaagaagttcagctccaaggtaaaaaggctgcatgaag

SEQ ID NO: 22917 - DNA, 251 bp, Glycine max
  Clone ID: 701102939H1
cgtgggtggtggttccggctgctgcgtcgggtctgccaccgtctccctcttcctctgcaaggaagggagggtgtgtccgagccaattttggtaacaatcctgctgtgagaattgaggggttcgattgccttgacagggacaggcgaaattgcagcatcccggctctggcttagaacaccctcctcacacgccacacgtctctttgatattaggattcagttcaacatataaacataaccacagaagatgag

SEQ ID NO: 22918 - DNA, 255 bp, Glycine max
  Clone ID: 701102940H1
agccttcctagaacgaaaaaaaaaagaagagcaattttccctcaccaaagaagaagaagcaaacaatggccgatcaacttaccgatgaacagatctccgagttcaaggaagccttcagcttgttcgacaaggacggcgatggttgcatcacaaccaaggagcttggaactgttatgcgttcattggggcaaaacccaactgaggcagagctccaggacatgatcaatgaagtggatgctgatgggaatggtacca

SEQ ID NO: 22919 - DNA, 256 bp, Glycine max
  Clone ID: 701102941H1
gttcacttggcaaccatccctatcaccggcactggtatcaaccctgctcgtagtcttggtgctgctatcatcttcaacaaggaccttggttgggatgatcactggatcttctgggtgggacctttcattggtgctgcacttgcagcactctaccaccaggtcgtaatcagggccattcccttcaagtccaagtgattcaatcaaaccgttcatgcttaatcaagttgggaacaacaaaagaactcaaaacaatgtt

SEQ ID NO: 22920 - DNA, 257 bp, Glycine max
  Clone ID: 701102942H1
gcatatatataattaacaccctcgcatttttttcttcctaaaagaaaaaaaagaagaagatggagtttgtgaagagagtattgggaagcagcaagagattgtatcctgaaaacagtggtggaagtggcagctacggcacgaagattgagcacctcaaagaagaagaagaagaaggctccacagggttgcatttgcgtctacgttggagccgagagagagagattcgtgatcaaggtaaagatcgcaaaccacccttt

SEQ ID NO: 22921 - DNA, 248 bp, Glycine max
  Clone ID: 701102943H1
aagaaatggagagaaaggagtgaaaaaattatatgtgcaaaaatggcaagaaatagccaagaaatgcataacaattctacctataatcaattttgcatgatgccttaagcaattttgaacaactctgtgttaccagctaacactcacctgcatctagagttgacaaaatggacatgttagtcaggtccatcaggtcggcatttgtttccagcattctcactgttgaatctatcacctcccattgtaat

SEQ ID NO: 22922 - DNA, 232 bp, Glycine max
  Clone ID: 701102944H1
cttcagcacaatggcttctctggcattattccttctcctgtgacgcctaaactcatggcattggacatttcctttaacaacttttctggcagcattccacgagcttttcagaatcttagaagactcacttggttgtatctccaaaacaattctatatctggagctattcctgacttcaaccggccaagtctcaagcatttgaagttgagcaataatatcttgaatgggctca

SEQ ID NO: 22923 - DNA, 256 bp, Glycine max
  Clone ID: 701102946H1
tgacaagggtagactgtcaaaggaagatatcgagaagatggttcaagaggctgagaagtacaaatctgaggatgaagagcacaaaaagaaggttgaggccaagaatgctttggaaaactatgcatacaacatgaggaacactgtgaaggatgacaaaattggtgagaaacttgatcctactgacaagaagaagattgaggacgcaattgagcaagctatccagtggctagacagcaaccagctcgcagaagcagat

SEQ ID NO: 22924 - DNA, 257 bp, Glycine max
  Clone ID: 701102947H1
tttcgaatgggatgctaactttggaattccaggagcattttacatcagaaactacacctatgatgagttcttccttgtcagtgtcactcttgaggacattccaaatcatggaaccattcacttcgtctgtaactcatgggtttacaactttaaagactacgacaaaaaggatcgtattttctttgccaataagacatatcttccaagtgcaacaccgggcgcattagttaagtatagagcagcagagttgaagattt

SEQ ID NO: 22925 - DNA, 255 bp, Glycine max
  Clone ID: 701102948H1
gtccagacatagtaaggattgacagactgagagctctttcttgattctatgggtggtggtgcatggccgttcttagttggtggagcgatttgtctggttaattccgttaacaaactttgacctgagccgttatatcaattggccacgtcctaaaacagaagaaaatcatcaaactattcctagcaatgaaaatgtaaactctaatgctgaacttgagctaggttcggctagtgatgagatcacagaagagggtgt

SEQ ID NO: 22926 - DNA, 267 bp, Glycine max
  Clone ID: 701102917H1
gtttgaactttgaacgttgaaggaacatagaggcagaggtttttcttctctcaccgtagaatcgaatcgagttcactttgatcgtgtgtgtctccgatcttcaaatccgcaacaaccatggtgaggggattgctcaacaagctcgtctctcgctccctctccgtcgccggaaaatggcagcacaaccaactccgccgcctcaacatccacgagtaccagggcgctgaattgatgagcaaacacggagttaatgttccgagaggcgtg

SEQ ID NO: 22927 - DNA, 273 bp, Glycine max
  Clone ID: 701102888H1
cttcttgattatactctgcgaaataatttttgcgtttcattgtcttataattagcatggcctttgccgcagttaaagtgttcatgatattggggcttttagccaccgcgtgtgtagcacaagcccctggacctgcacccacgcaaccaccatcaacaaccccatcaccgtccacgtcagcacccgccccatcaccaaccgcaaacacccctcctcctgcggctgcacctgcacccgcaacaccacacccacaccgctccttcatctccaactc

SEQ ID NO: 22928 - DNA, 269 bp, Glycine max
  Clone ID: 701102889H1
ccctagtctccatacatcaacttgggaggttaaagagacggcaacgttgtgctgtccgccttgaccgagccagagcttcgtcttggccctcgattttgccctgtaaaactaatcccagtcacaacagaaataatcaatggcaccgaaacagaccaaggctgagaagaagatcgcttacgatgcgaagctgtgcgacctaatggaggagtacggccaaatcctcgttgtcaactccgacaacgtgggatcgaaccagctccagaacattc

SEQ ID NO: 22929 - DNA, 268 bp, Glycine max
  Clone ID: 701102891H1
gcgtggttgattccggtaatggtttaaaatacacgaacttattcgacgctcaaatcgacgccgttttcgctgccatgtcagcactcaaatacgacgacgttaagatcgcggtttcggaaacgggttggccttctgctggggactctaacgagattggagccagccccgacaatgcggcgtcgtataacggaaacttggttaaacgcgtgttgagtgggagtgggacccccttgaagcaaaatgagtcactcgatgttttcctcttcgc

SEQ ID NO: 22930 - DNA, 263 bp, Glycine max
  Clone ID: 701102892H1
atttgcaatcaattcaatcatatatcagaggatgaagattgttgtgatgctattgctaccgcccttgatgtttgcactgtttttttcatgcacgagttcattggcagtatccacaaatacaagtaccacatgccccatggacttgaattacgttctgagaatcccatggaacacttctgcctgccataacttccaacaaactctggcggctaaaaacggaaccgacgctaacacatgttgcatctctctcttgtccctcttcg

SEQ ID NO: 22931 - DNA, 269 bp, Glycine max
  Clone ID: 701102893H1
gcgccacccaaatctgtttcaacgcaagagaaacaacaagagaggagcaagcaggcacatgctgtcaccaccccacgatctaaaagaagaaagaaccagcttaagaaagtttgtcaagtgccagttgagaatctctcctcagacatatgggcatggaggcaatatggccagaaacccataaaggggtctccatatccaagggggtactatagatgtagcagctcaaaggggtgtttggcaaggaaacaggttgaaagaaacagatcaga

SEQ ID NO: 22932 - DNA, 261 bp, Glycine max
  Clone ID: 701102894H1
ctcagatctgatttcgcacaattttatgcttgtgatatctccccttctctcattatcattgctcgcacgatgatagatatgccatgagagataatagggcagatctgatgatcgtttagcaaagatcattataatttgaatttcagctgggttcatgaagcaatatgaagaaccaacacggttacgtgccagcgcttacatacctttggggccgtcggattcagaggcagtggatgtctctctgcttcagcgctctagtac

SEQ ID NO: 22933 - DNA, 188 bp, Glycine max
  Clone ID: 701102895H1
gtttcttcttctgcaggaccaaattgatatacaagatcattgttttagagagagagagagagatagagagagagagagagtatactgtttgggtcacagactacttctctgagcagatctagatatatctcggctgcttatgcgcataaccccttgagacgcagatcgagagacacatgagcaccagt

SEQ ID NO: 22934 - DNA, 274 bp, Glycine max
  Clone ID: 701102896H1
cctgcagttagcctcacaaacccagaacatcccccgttgttcaaaaggattgtagtagaggagtatatcaaagattacttcactcataataagttgaatggaaagtcctacttggagcatatgaggatcacagacgatgaaaaatttaccaacgcctctatctagcacctgcaacacacacacatatatatatatagtgaagggttgctaacttgttatataggtatatatgtgtgtgttgcacaatgtcagtgaaagtaaaatgtgttgggga

SEQ ID NO: 22935 - DNA, 270 bp, Glycine max
  Clone ID: 701102901H1
ctcccagccccaaggtgtgtttgtcttgcagatccaacacgcctcaaccacactctctctatttatatccaactgtcccatcctcactcgcaacccttttccccttttatcaattcaaaccacgccttcccctgttcacaacctagcttgcccacaccaccatcacaacacaaaccattcctctcttgcatttaaacaagaataaatatagattctgggggcatttcctggattctggttctcgttggtcactccatcaaacaccctttg

SEQ ID NO: 22936 - DNA, 263 bp, Glycine max
  Clone ID: 701102902H1
gtcgacgtccatgatttggttttcttcctctacattcaatcctacaagagcgtcctcccgcgcatccataaggactccgccgccgtcaccgacgtctggccttccacctccgccttcgatggctacttgtccgctctctcgccgcttcagctcgtacgcagcaacagtcggcggttcatgccgtcccaggctgatgacgaggcgcatcagttgtcgtatctgcaaaagcacttggctaaccttgtgtctcttctagcagagcc

SEQ ID NO: 22937 - DNA, 258 bp, Glycine max
  Clone ID: 701102903H1
cggctcgaggaaaaagttttgggatcatctgatcccgattcaggtaaaggcaagagcaagatgaagaagcacataactcatggctttcacttggtaaagggaagatcaggtcatgccatggaagactatcttgttgctcaatttaagcaagttgacaacaaagagttgggtttatttgcaatatttgatggccactctggtcacagtgtacctgattacttgaagtctcatttgtctgatgatatcctgaaagaccct

SEQ ID NO: 22938 - DNA, 281 bp, Glycine max
  Clone ID: 701102904H1
gcgtagtaactcggatcggctcccctcgagcgaatcggtcgacggctcgaggtgtaactagctgcacagttgtgatggcatacgtctctggaagaagttctgctctgaacccaaatgcacctatgttcatacctgctgcacttcgtcaggtggaggatttttcacctcaatggtgggatcttgtgacatcttcaacatggtttcgtgattattcgttgagccaccataaggaggaagaatttgcatcagttgccaatgactctactaatgatgatatggag

SEQ ID NO: 22939 - DNA, 257 bp, Glycine max
  Clone ID: 701102905H1
caaaaaacatacttcttgatagtaatttcataccaaaggtttctgattttggtttggcaaaattgctgagagatgaaacatctcacattagcactcgggttgcagggacattgggttatctagctccagaatatgcaaattctggccaggtttcgcgaaaatcagatgtttatagcttcggagtgttacttttacaaattgtgagtggcctagcagtggtggatgcctatcaagacatagaacgtttcatagtggag

SEQ ID NO: 22940 - DNA, 258 bp, Glycine max
  Clone ID: 701102906H1
cagacccaaagaacacggagttagcggcagaactttatctctctgatttcgatcatggcagctgtagctccttcttctgacaaaactgcagatttattgcagaatttgactctggactctgagtccaaagccattggagttgctgagcctgcgaagtagaatggacctgcgtttaccaatggggacgctaaagggagggccaagccattcaatccaaattcatgctttgttccacatgggtacacatctgcgtattat

SEQ ID NO: 22941 - DNA, 257 bp, Glycine max
  Clone ID: 701102907H1
ttcccattgtaggctgtgagctcacgccttacgtgctcctacgccgacctgataagaccgttaccaccgatgatttcccggaaaccgccccgttagacggccatttcttgcgctacaagtggtatcgtgtacagagtgataaaaaggttgctgtttgtagtgtacatccttctgagcaggccgcactgcagtgcctaggttgtgtaaaggctaaaatacctgttgccaaaagttatcactgctctccaaagtgtttt

SEQ ID NO: 22942 - DNA, 256 bp, Glycine max
  Clone ID: 701102908H1
gtagagctgaggcacaccagctctattccagaaaagccatatttgatgcacttggggttcaactttttgcagttcttcatgagcaaatagactcagaggtaaaagatttctggcctcgatactggggcggtgtcgtgcttcttgatcgaggtagggacttcttcaaagctcttggagggggaaaactgctcaaggagaagttcctatcaggatttttgctgaatcctcgatcactctccaactacaagcgtgcaaa

SEQ ID NO: 22943 - DNA, 251 bp, Glycine max
  Clone ID: 701102909H1
gaaaatcacacaaaagcacacacacacacacccttcttcgagtctgaatttgtatcattgacaattttttcacaaagggttgttgtctcttcagagagacacagatcttgaggttggaggcaaaatccttcacacactttggtggttatggaaacagaagagaggaaccagaaagattgcaaggcttcggagccagagtttttcttgcagtgggggaacaggaagaggctgagatgtgtgagggtgaagga

SEQ ID NO: 22944 - DNA, 255 bp, Glycine max
  Clone ID: 701102910H1
ggaaagcatcctggagaactcttgactatgctgtcttcaaacaagtatttgtcatcaatggaggaacctcagatgctactgaaggatgtgcttgaccaacggcttcgactaccaacggaccaattagcagaagcagtagtgttcacaatgaccatagctttggcatgcacacgtgcggctccagagtccagacccatgatgcgtgctgtggcacaagaactatcggctactacacaggcttgtcttgcagagcca

SEQ ID NO: 22945 - DNA, 255 bp, Glycine max
  Clone ID: 701102911H1
cgggcattgagaaggaaggacgctttcagaggcgaaaggccatggggagataccgtctgtgatccatggatctccgatcgggaaaccgtatccaagctccgcggctagtctgcgctctttggacttttaaaacttagcgaactgaaacatcttagtagctaaaggaagggaaatcaaccgagaccccgttagtagcggcgagcgagagcggattggggtttgaagaaaaacaaacacgaagcttcgtttctcttt

SEQ ID NO: 22946 - DNA, 255 bp, Glycine max
  Clone ID: 701102912H1
cttcttctcttgcggctagggttttagcgcagttgcttctagataccaggcagatgggtaaggaaaaggttcacatcagtattgtggtcattggccatgtcgactctgggaaatccactaccactggtcacctgatttacaagcttggaggcattgacaagcgtgtgattgagaggtttgacaaggaagctgctgagatgaacaagaggtctttcaagtatgcctgggtgctggacaaacttaaggctgagcgtg

SEQ ID NO: 22947 - DNA, 253 bp, Glycine max
  Clone ID: 701102913H1
gatctatccactcacctgcctcttcctcacccctttctccatctaacgagtaaggaaaaatggcgcgtaagaagatcagagagtatgactcaaagaggttgttgaaggagcactttaagagactttctggcaaggagttgccgatcaagtctgcacaaattactgcatcaactgatttcactgagctacaagagaaggaaccctggctttcatctgctaaattggttgtgaaacctgacatgttatttggaaa

SEQ ID NO: 22948 - DNA, 256 bp, Glycine max
  Clone ID: 701102914H1
caaggaggagacaacacaaagtgcaaaaaaacagaaattaaacactactagtagctagctagggtgagaaaatgggtgaagctaaggaaatatggtctgcaccaataacccctagaacagcttcagtagtaggaacacctgttgtgcgcatctccacctgtgtcatgtccaccctctcagcttcactcaccatctctaacaaggtcacctctacttcaccctgaggatggagatgcaccacgtcgtaaaacatcta

SEQ ID NO: 22949 - DNA, 257 bp, Glycine max
  Clone ID: 701102915H1
atcaggaacgccacaccatcagtttccttctgctagcacacagacggttatagaggaatctgagtatgagtttgagaatgatcggcaaagatatgctggactagaggcaacaaagccaggtgaaaagcctagggtggttgttcttggtacgggttgggctacgtgtcggttcctcaaagggatagacaccaaaatttatgatgttgtgtgcatatcaccaatgaatcacatggtctttactcctttgcttgcttcaa

SEQ ID NO: 22950 - DNA, 254 bp, Glycine max
  Clone ID: 701102916H1
gagcatttgaggccttgaacactcatcttgcctccaatacttaccttgttggccattctgttacccttgctgacatcataacaacatgcaacttgtatttaggattcagccagctcttagttaagagcttcacctctgagttccctcacgttgaacgatacttttggaccttggtcaaccagcctaacttcagaaagattctaggtcaggttaagcaaactgaggctgttccacctattccatcggcaaagaag

SEQ ID NO: 22951 - DNA, 273 bp, Glycine max
  Clone ID: 701102887H1
agaatatctatctctcattctctcgtgcctcaacgcttttttaactcctttcgcttttccattccaacctctttcacacttcagatctgtttcttcatcggttgttcaagtaaatcgcctttgtcaccactgctgaagtgtgtgatgcgaacccacagttaattttgagtggggagcttcgtgcccttcagccagtttttcagatttatggccgtcgacaggttttctctggacctatagttaccttgaaggtgtttgaagacaatgttttgg

SEQ ID NO: 22952 - DNA, 272 bp, Glycine max
  Clone ID: 701102859H1
gtttctttgtttgcagcccttggctttcttctctacggtggaagactattcttgatgctgcaacgctttcctgtggaatccaaaggtcgacgcaagaagctacaagaggtctgtattctgttttactaagaaatttttctgtatttatctgctcttcacctcactcctccccttgctttacccagagttaatctacctgatctttctactgcaggttggctatgtgactaccatatgcttttcatgcttccttatcagatgtgtcatgatgt

SEQ ID NO: 22953 - DNA, 274 bp, Glycine max
  Clone ID: 701102860H1
cttgctccctcagatgcgaagaagaagccacagagaactagtctcctactctcacccgcaagacaaaaatggcatctcacatcgttggatacccccgtatgggtcccaagagagagctcaagttcgctctcgagtctttctgggatggcaagagcagcgccgaggatttgcagaaggtgtcttctgatctcagggcatccatctggaagcagatggctgatgctgggatcaagtacatccccagcaacactttctctcactatgaccaggttct

SEQ ID NO: 22954 - DNA, 270 bp, Glycine max
  Clone ID: 701102861H1
cctcgagccgaatcggctcgaggtttgttacctcactttgttttacttctctgcagtaatactaaaaaaagaaagaaagaacgaagaagaagaagaagaagaagaagatgttgagggttgcagctagaaggctctcttctctctcctcctcctctccgtggcggaccaaccacgccgcttccgcttatgtctctcgaaacgcatcgttgatgaccgcagatccgatccttcctcccatccctttttccctcagaggttttgctatgaatc

SEQ ID NO: 22955 - DNA, 273 bp, Glycine max
  Clone ID: 701102862H1
atcataagacaagcaacgctaaggctaacggtaacggtaacagcggggtgaaggaggtgcattttcgtggagtgagaaagaggccgtgggggagatacgccgcggagatcagagatcccggcaagaagagccgcgtctggctcggaaccttcgacacggcggaggaggcagcgcgtgcctacgacgccgcagcacgagagtttcgcggccctaaggccaagacaaacttccctctccctttggaaaatgttaagaactcgagccccagccaga

SEQ ID NO: 22956 - DNA, 273 bp, Glycine max
  Clone ID: 701102863H1
ccaaggtgaagcaccgataccggacctatctccggcgaatccccagtccccactttcttccttcgaaatgaatcccgagtatgattatctgttcaagctccttcttattggagactctggtgttggtaaatcatgccttcttctgagattttctgatgattcgtacatcgaaagctacataagcaccattggagttgattttaaaatacgtaccgttgagcaagatggaaagaccattaaactacagatctgggacacagctgggcaagaacg

SEQ ID NO: 22957 - DNA, 302 bp, Glycine max
  Clone ID: 701102864H1
gcagaatcgcggctccagctcactggtggtcagatcttggagtaagacttcaattcatatacaccatagacacatactatcttcataagcaaaggactcaaagtaatagttttctacaaaaaaattgaagtttggggggggatctacatctctatgggattatcactttccttactctcatcagcctgggaagaaatcgttagacattcactatttggtctgtctttgaacttcacttttggttccaaagatggggctatgattttgagatcaggtagcttcaagataagagaatcagaaac

SEQ ID NO: 22958 - DNA, 279 bp, Glycine max
  Clone ID: 701102866H1
tgaacattgaacaactcttcacacaacaaaacttttttctggcattgtagcatcatgactggcagagaaatcctccatatgatgaaggtgaaagcagggtttggaacaccagacacagggaatggaaaaggcaaaatatcaaaacacattacacatggctttcacttgatgaagggcaaatcagcgcatcctatggaagattatttagtttcagaatttaagcaagacaaggacagagaattaggcttgtttgcaatatttgatggccacttaggccat

SEQ ID NO: 22959 - DNA, 277 bp, Glycine max
  Clone ID: 701102867H1
ggaggcgcctctgttattatcggagaagagaactggatcgattgaagaagagagtggaaaatggagctcgtatcagtatgtgggtggaaccggttctgtgaggccaacttcttcattggctggaactgaggtgagtgtggatgaaattcgatctgctgctgctgcttctggttactatcccccttcccttcatggagccttggttggttcacctgagcctgatcctacagagcaagctcttgtttatcagggtggatatggaggagattatggtgga

SEQ ID NO: 22960 - DNA, 206 bp, Glycine max
  Clone ID: 701102868H1
atgatatcaattctccatcaacaatgaagtgatggatttatgttcactatgtaagggctcatacacatgacatcagggccctagctgttgctgtaccgctaagtcacgaatatattaagccagaaaagaggattaactgagctctacgtgcagaaactcccattagtttccgttaccataagtaggctctttgggaggttcctatg

SEQ ID NO: 22961 - DNA, 276 bp, Glycine max
  Clone ID: 701102869H1
ggtgagttttataccattagacttaaggacggaaaaaaggtacactcttatgtcttttccttgaattttctagctacctgttcatttattgaataatcttatactgcgggcatataagggatataattttgctcctggctgtgattcttattgggtatgtgacagtgatgatgctgatatattaaaatcgaatggtatgaactgaagcaagcgaaaattatttttaccaaaaatgaaaaatataatatggaataaattaaactgttaaagttgatg

SEQ ID NO: 22962 - DNA, 275 bp, Glycine max
  Clone ID: 701102870H1
gtacaccgtggctgcggcggctccggttccgttaccggcgccggaggttggattaggagcgttgaatttgaatgcggagtttatggcggtgatgcatgagatgataaggaaggaggtgaggaactacatggagcagcagaatgggatgatgtgagatcagggtatggaaatgatggaagggtttaggaacgtgtcggtgaagagaattgggattagcagggtggattcgtaattattattattattattattattatgacctaattagtgttttc

SEQ ID NO: 22963 - DNA, 276 bp, Glycine max
  Clone ID: 701102871H1
ttgccacccagttttgaatatatttttattccttctttgtttcttcactttcttccatacacataaccatgtcttctcagactgttgtcctcaaagttggtatgtcatgtcaagggtgtgctggagcagtgaacagggttttgggaaaaatggaagttcctgttgggctgcgattatataattatgtggttttcttgttcacaattaacttttggacaccatcaagaataccctgcacaagtgaagtgctgttatggtgggttacttcttattaaa

SEQ ID NO: 22964 - DNA, 274 bp, Glycine max
  Clone ID: 701102873H1
ataattatgatccagtggtgattaatgttacacgccctctcttcctttctctcgctctcattgtctgtccttgccacagaaaccctgatggaaaccccaacaaacgggatttgtattgcatttgagctctgttgtagtacctgaaaaccttaatcatcttatggagacctacaacaatcaacagcagcagaagaagaagtggtttatgccactggttctgtctctactactgtccaccctgctcatacttttgtccatcttcgtctcctccgat

SEQ ID NO: 22965 - DNA, 270 bp, Glycine max
  Clone ID: 701102874H1
gtgtaaaataataataatttttatccgggcaaatggtgactgcattcctaattgtacaaaactacaaaggaagaaagtctttggaagtggaatggacccggtgagatagctgttacagggtgctatgagaagcacgtgtcatttacttttttttttaatctttctttgcacataataagctcagtttggttcttcctttgttcttggtattttcaattttatttttcttgtagttgcagttaccgattttaacaacataacaaatggcac

SEQ ID NO: 22966 - DNA, 271 bp, Glycine max
  Clone ID: 701102875H1
ggatacgaaacccacatcacaatccaattccatgaccctttgtatggctgcagaaaatatgagcgaggtggaagaggagcatggatatgtcttcaaagaagagatccatctcacggtgttcaaaacttctctgttcttcgcgggcgatggcttcaccgtctacgattgcaaaggtcaacttgtgttcagagttgactcttatgggcccgacacccgcgacagagacgaactcgttctcatggatcctaacggacgttgtctcctcaccgtt

SEQ ID NO: 22967 - DNA, 165 bp, Glycine max
  Clone ID: 701102876H1
attaaatttttcttctctcccttctttctctctctctctctctgaccattctcttcttcttctttttcttctcctctctctctctcccctccgccatggctgaggataaggagatgtctatccctgtcatcaatgggaatgattccctaaatggggaaaatcata

SEQ ID NO: 22968 - DNA, 252 bp, Glycine max
  Clone ID: 701102878H1
tttcatctttgtcatccacttaacccaggtgtataaatgtcagcattgaacatgcccactatgagacttccaagagcttccttgtctggaacaacaccagctatgagattcatgtgctcttacaaagagtccatcatcttggaggtctgtgaagattgtgtctaaagtgtttggattgaaatcatcttcctttagagtgtcagcaatggcggtatataaagtgaagctgattggaccggacggtgaagagat

SEQ ID NO: 22969 - DNA, 266 bp, Glycine max
  Clone ID: 701102879H1
cggaaacagttttcgtcgttcattcatcagctgttctcttcgtttttctgcctacaatggatgagaattcagctacatatggaacccatgaggtggttttagatgtaaacagggacgtctctagaacaactcaagcttcacgctcttgtgtcaatgtttctttcttgcagaagttggtagctgaggtggtaggcacgtatttcttgatatttgcagggagtgcttctgtggtggtgaacagaacaacaaaacgttgtaacacttct

SEQ ID NO: 22970 - DNA, 293 bp, Glycine max
  Clone ID: 701102881H1
gtggtcgtcgcatgtgcttagtatgttttgaagattttgattgtatgtgtcatcagttattccattatgcttgaatccttgattcctattgaagttgatagctctctaacttgaaatctacttttttctttgcctagttgagcagtagtcaattgccaatacttgtgttgacagatgttttcactaaaattgtgttttcttaatgttgtaataataactagtattgtcactaaaaatgattttgactatctgactatgttagttgattcttagtgttagtaattaatttattg

SEQ ID NO: 22971 - DNA, 267 bp, Glycine max
  Clone ID: 701102882H1
acgctttacaaccctacgatgatgagtcagcattcccgtaggaggctgccacgtggcaatccaagaaaggccaagcgtgacgaagttgacaagcaggctgcgcccaaagccgccgagccggcaccatcctcgaatcggcttctagccggctatcttgcgcacgagttcttaaccagaggaactctgttgggtcagaagtttgagctggacttggaccgagccggcttggctgggtccagctcagcagaagctcaccgtggagcgaga

SEQ ID NO: 22972 - DNA, 266 bp, Glycine max
  Clone ID: 701102883H1
caaagacacattctttcagcctcccttcaacacccttttggcccttcattcttccaagtctcaaatcgaagctcgaagacctgcgaagaacaaagggttgtttaaattctgtgtggttgttgttggaggttgaaatacaagttgccgcctcaagtgtgtgttaatcttaaatttcacaagcaagttgtatttttggagtattgtattatatgaccaaatattttagtgttttaggactagatattttgcttctggtggcaattttt

SEQ ID NO: 22973 - DNA, 139 bp, Glycine max
  Clone ID: 701102884H1
gtccaatttcctttcctttcctttctctccattggacactgcctcttgtctctctcaattggcttttcttcccttttcctttattggggcagcctctctgcaatccacagataacttagattcattccacacaacataa

SEQ ID NO: 22974 - DNA, 275 bp, Glycine max
  Clone ID: 701102886H1
aatgttacatgagaaggacatgaattcacgagttttctatggaaacgattccatttatgtgctgcttagacttcatcagacattgtatgagaggatacaatcagcaaagattaactcatcatctgctgataggaaatggaaggcttcaagtgatacaagctccaccgatcaatatgacaggttcatgaatgccctttacagtttgctggatggttcttctgataatacaaaatttgaggatgattgtcgagctataattggaattcaatcatatg

SEQ ID NO: 22975 - DNA, 274 bp, Glycine max
  Clone ID: 701102858H1
gtctaacattattgtttcctaccaagttctctgtctggggagttcctagcaccaccaccagcttctgcagtagctttaagctacgaaagattttccttgaccatggggcaaaagcatttagtgacggtgtacagtttatgggctttaacatgttcccttcttccatctttctcctttggaattctgagaattggtttgaagaagagacctctagatcttgatagtattaatgctgctagaaaggcaagagaaggtctaagatctgtaagaccaa

SEQ ID NO: 22976 - DNA, 277 bp, Glycine max
  Clone ID: 701102833H1
cacttttcttcatagcactcaaaaaacaacaactcatctcatcattattccctttctcactcagcacattccccacagtagcaccatcaccaataataatggcatcatcctcatcaaccgttgctttgagaaccatctcctctttctctctgaaacctgccaccacaacaagatcattactcaacactagtacttcatccaccataaccctcttaccctttacatcagcaaactcatttctctccaaaccctcaactcaacactcttcccaacatct

SEQ ID NO: 22977 - DNA, 285 bp, Glycine max
  Clone ID: 701102834H1
ctcgagcctttcatcttggatttgtgttcaagtgtccgataccgagtgcattttatgcagtttttgatggccatggggggcctgatgcagcagcctttgttaagaggaatgacatgaggttgttttttgacgatgcagacatgctgcagtcgtatgatgctgatgcgttttttctacagaaattggaggattcccatcggagagcttttctacgggcagatcttgccttggctgttgaacaaactgttggtagttcttgtgggactactgcattgactgcccttg

SEQ ID NO: 22978 - DNA, 276 bp, Glycine max
  Clone ID: 701102835H1
gtcgcttgggagtgcagaaaggtgccaccttggactggagtgactacttctttctccattacaggcctccctcacttaggaaccaagctaagtggcttgcatttccacaatcctttaggaaagtgattgctgaatatggggaggaagtggttaagctaggaggaaggatactcaaaatgatgtcaataaaccttggcttgaaagaagatttccttctcaatgcatttgggggagagagtgagttggtgcatcctaagggtgaattctacccaagtg

SEQ ID NO: 22979 - DNA, 210 bp, Glycine max
  Clone ID: 701102836H1
tcgtacttcacagtagcattcctgtgcttattgtctgcaatgctagtttgtttacatgataaaatgagaatagttgcattgctagtttgttttatggttcacacatccagtcccatgtggcttttgcatattcagtatcacttgcgagcagaactttcttcctttggctatttatggtgtgaaaaatatggtagcttcttaacgggcttg

SEQ ID NO: 22980 - DNA, 283 bp, Glycine max
  Clone ID: 701102837H1
ctcgagccgttcaaattcccacacattcttataaacataacatactctctcttccaaagacgtttcactttaccaaaaaagctttccctttgagaaataaaacccaaaaccagtcttttgataattttgagcagttgcattccttgttttcctcctttttgggtcccctcaaaagtagtttcaaagagttcctcttcctccacagatatcatggcagatcaaaccccgggttcaggaaccgtttctgttgaagcttcttcacaagaaagaaggaaacttccca

SEQ ID NO: 22981 - DNA, 80 bp, Glycine max
  Clone ID: 701102838H1
tttgattggtaattgattttgagggtttgactattcatggagtatgatgttatgagaaaaacttcatgttacttatttca

SEQ ID NO: 22982 - DNA, 218 bp, Glycine max
  unsure at all n locations
  Clone ID: 701102839H1
cttacttatttattctccgaaaatggttgatttacattggaaatcaaagatgccaagttccgacatgccttccaaaactctaaaactctctctctccgacaacaagtccttaccctctttgcaactacccttccgcaccacagatatctctcacgccgcaccttctgtttcacgcattacgactantatctccgtcttcctcaactcagaaagctttg

SEQ ID NO: 22983 - DNA, 279 bp, Glycine max
  Clone ID: 701102840H1
taagtagcaagctagatactcaagcctatggtgatcatacctgtataatagcaaaagaacatttggagcctaacttaggtgggctcactgttgagcaggctatccaaaacaagaagttgttcatcttagatcaccatgactatctcattccttatttgaggaaaataaatgcaaataccacaaagacttatgctacaagaaccatatttttcttgaaagatgatggaactttgacaccattggccattgagttaagtaagccacatcctcagggtgaag

SEQ ID NO: 22984 - DNA, 279 bp, Glycine max
  Clone ID: 701102841H1
gcacaaagaggggttcctagacaagatcaaggacaagatccacggcgaggagggtggcgccaccgccgagggcgagaagaagaagaagaagaaggagaagaagaagcatgaacatggccatgacagcagcagcagcagtgacagtgattagattatctcccactgctgcatcacctatatatcttataaggtgtatgggaccatagtagtgagggctgtgtctttctctttttttcctacttgtcatttatatttatgagcgagagaaatagtgcgtgt

SEQ ID NO: 22985 - DNA, 274 bp, Glycine max
  Clone ID: 701102842H1
atcgagcgaatcggttcgagaataattcctttctaattaatattatttgttttcaataccttattacaaattctttcacattgtgcaatttggaattgaaatttgaacagatctggtgaattgaattgaattcgaaattgttgtcgtggttgctgctgctgcagctgcaaggaatgccgctgatattagcgaaaagcgattcgatccagattcgcgaggtgtggtacgataacctggaagaggagttcgcgttgattcgcgaaattgtggacaa

SEQ ID NO: 22986 - DNA, 227 bp, Glycine max
  Clone ID: 701102843H1
cggctcgagcaaaattgaaggaatctattcagaaaatagagaaatccatccgaaaaatgtaaccaatattgttgcctgcatatattatgtaacatactcttgagttttgagcatttttttttaatcattctctttcttgattttgcagttttcaacaagttattaaattcattgaaaaaatgtttgaaggatgtgttagatagtatattcctagcaatattacatgc

SEQ ID NO: 22987 - DNA, 275 bp, Glycine max
  Clone ID: 701102844H1
cttctttctttttctgtgagcctttctttcaggttcttaacttgcatcagtgtgcagtgtccaaatcataagggtagttgcaaattgcaatggctaagcatgatgttgagggtggttccttctctgcaaaggactaccatgatcctcctccagcaccgttgattgatgctgaggaactcacacagtggtccttctacagggctttgattgctgagttcattgccacaatgctcttcctttacatcacagtgctcactgtgattggttacaagagc

SEQ ID NO: 22988 - DNA, 276 bp, Glycine max
  Clone ID: 701102845H1
agagacgcaagcatgtagaacatgaacttgatttggtacagcaggagatcccggagtgcagaaaaaaatcggtggttgctgagcaagcaaaaacgcaagtactgcaggagctggatagcactaagaggctaatagaagaactaaaacttaacctagagagggcgcaaaccgaagagcgtcaggcaagacaggactcagaacttgcaaagcttagagtggaagagatggagcaaggtattgcagacgactctagcattgcagccagggcacagctgg

SEQ ID NO: 22989 - DNA, 205 bp, Glycine max
  Clone ID: 701102846H1
atgaatactataatataatatgcgaagtattgaaccaattaatggtgagcttcgttggtctctcgtccgtgttgtaatgatggatcgggtactagctagttctgcagttccactgtgttgtaatgtctggttttgtttgaagtgcttataagcatgattaatttgctgtgttctgcagtagatgaatgaatctgatgtgcttatt

SEQ ID NO: 22990 - DNA, 275 bp, Glycine max
  Clone ID: 701102847H1
caattgagggcaccaaaaaagaagcagcttcaggctacaaaactgagcgtggaaggtcgtggtatgatcaaatatttataaatgtgaccacgttgatactggatgggtttgtttgtcctgctgcaagcttttcatataatgtgctgcctgcattgatgtggattcttctaaaggtgggctattcgttcagtgatctacatggaaatttgatggagagggatgttatgaaaataccatccgtatgctgcatttgtgtattcatctagtgcagtagg

SEQ ID NO: 22991 - DNA, 242 bp, Glycine max
  Clone ID: 701102849H1
ctcgagcgaagacatagagaacaacaatgttgcaccttctgtacgcggtgatattcggggtaatgctcgtgatcgcgagctctcctcttcaaaactccggcgaagaagctcggtcatcatcacattggatcgggtcaaccacggtcgcgagcaccgtcgtcgtcaagaccgtcgccgccactctgctgatggttctcgcttcctcgctctacagcatcgccaagatccggcgttggaacctc

SEQ ID NO: 22992 - DNA, 274 bp, Glycine max
  Clone ID: 701102850H1
atccatctttgccttctgcatgttggttctctgtaaacagatactgcaaaagaagaataatattgaatatttggttgggttgaatccctgggttgaagcgttgcagacatcacggctattctaagagtgtctcgctctctcattcatgtcccaactgtacgacggaggacaggttgcgtaactgccaccaacccgtcgccgcacggtgggcgtggtgctttgccttctgaaggtggtagcccttcagacttgctcttcttagctggtggtggtt

SEQ ID NO: 22993 - DNA, 279 bp, Glycine max
  Clone ID: 701102851H1
gcgctgctcaatttgtccatttttgacaagaacaaaagtaggattatggacgaggaagggtgtctaggatcgattgttgatgtgttgagatttggacacaccacagaggcaaaggaaaatgctgctgcgacgttgttcagtctatcggccgtccatgactataagaaaataattgcagatgagatgcgagcagtcgaggccctcgcaggactgttgcaagaggggactccaagaggaaagaaggatgctgtgacagctttgttcaatctttccacacac

SEQ ID NO: 22994 - DNA, 239 bp, Glycine max
  Clone ID: 701102852H1
ctcgagccgtttttataaattttcatatgtttgatttaaaatttactcataacttaatttttcaatagaatatttaaacataaatcttattacttcataatctattttccaaaattaattctattaaaatcaaaattttcagccttgaacaacaaagctaagtaagttttttcctgtgtttattgttcgtttaaatgtatcagttttggagtaccatcctggtggagagaagtttccag

SEQ ID NO: 22995 - DNA, 278 bp, Glycine max
  Clone ID: 701102853H1
gctacatagtttttctgtttgaagtgctacaaacaatggcagctactcaggaagatgtgacgcttttgggagttgttggaagcccgtttgtgtgcagggtccagattgccctcaaattgaagggaattgaatgcaaatttttggaagaaaatttggcaaacaagagtgatctacttctcaaatccaaccccgtttacaagaaggttccagtgtttattcataatgagaagcccatagcagagtctcttgtgattgttgagtacattgatgagacatgg

SEQ ID NO: 22996 - DNA, 277 bp, Glycine max
  Clone ID: 701102854H1
ggatgcacttgatcgaccttcagatagctcccaacaccaactcatgtagaatattgggaggcactccttgtgcgttgtgattgggagctagctgaagctcaaagaaaggatgcacttgatcgagctagggtgcgtggagaagaacctcctgatgaaagaattgcagaagaaaggggtctacattgcagtgttgagccagatgtgaagaggcttttgcaggggaagacacttgcagagttggaggctttacgggtcacatgaatcagaaagcgtatgg

SEQ ID NO: 22997 - DNA, 278 bp, Glycine max
  Clone ID: 701102855H1
cgaaaccaaagcatgaagatgaattgctactggtggcatgccctgataatgagtggttgtgtgttgggcttgtgcgtgggcataggaggttgtgtatgtgtggtggagaacgagaatggaagaatcatcattgatattagtcacaggtaccatcctgatatgcctgcctgggaatccaaggatagccttgggcagtttttgtggcttacaagaagcatggccaatggttctctggctaacttctcccaattcaagctccccgctcacagcggcaccca

SEQ ID NO: 22998 - DNA, 278 bp, Glycine max
  Clone ID: 701102856H1
gttcttcgtgttctccattccctctctcactccttcatctacttcacatattatatcatcacatatcatagtgatatcatatcacaatgtgtggcatacttgctgtgcttggttgctctgattcatctcaagccaaaagggtccgcgtccttgagctttctcgcagattgaagcaccgtggtcctgactggagtgggctccaccaatatggtgataactatttggctcatcaacggttagccatagttgatccagcttctggtgatcaacccctcttc

SEQ ID NO: 22999 - DNA, 220 bp, Glycine max
  Clone ID: 701102857H1
cggcacgagtgctactattcaggcttctcttcagtcagatgcatctgaccttagtatgctagagattcaaaatgctcaaggactatctgatgtattgattgaaatgcttagcgccttgagtcgtaaagaccgtgagggtgtgaaggaggaagtgattgttgatcttgttgaccagtgccgttcataccaaaagcgtgtcatgcatcttgtgatcaatact

SEQ ID NO: 23000 - DNA, 275 bp, Glycine max
  Clone ID: 701102832H1
tgctcattttctctcatcttcagtggatctcaaaaacagtgacaagggtaactacatcactgcatctgatcttcaagctacatattcactctaccctggaagtcctgccagtagccttatatctccaatatcaaggaactcgggtgactgtttatcatcttcttttcctgaacgagagttccgtccacagtgggattcatcactatctcccgagaatggaaagtatcagagaactgggtctgggagggtgtcagggcatgacacaaatggtgtca

SEQ ID NO: 23001 - DNA, 288 bp, Glycine max
  Clone ID: 701102808H1
taaacatctttcactatctatcttcttttcatcatcttatcagatcaactctaatcctattttacatattcatatctatcttactactctcatattttcaatttgaggctcacgcacgaatgattaatgatttgagcatttgagagtgatcattctatggagaataataagatgatgggtgttaagaaagaggactatgctgccaatataggatcttcatccctcccttcttgtaataattatccattctctgatttctctgaagataatggctctttagggtttatg

SEQ ID NO: 23002 - DNA, 286 bp, Glycine max
  Clone ID: 701102809H1
aaataacactaacagtcaaagtgaagaacatgcaaatgaagaagacattgtaaatgaaaaacataagagacgtgaaaagaagaaagcaaaggaggagagggagaagcaaataagggctgctgaggaaagattactggaggatgatgtccctagaactgctgatgagtttgaaaagctgattagaagctctcctaatagcagtttcacctggataaaatatatggatttcatggtttctatggttgatgttgagaaagcccgctcaattgccgaaagggctttgagg

SEQ ID NO: 23003 - DNA, 276 bp, Glycine max
  Clone ID: 701102810H1
cgtttcttcaatggtttctggatccgaagaagaactggttcgccgctcagcacatgaaatccctctccagacggcttcgcaaatacgggctccgatatgacgatttgtacgatccttactacgatctagatgtgaaggaggcgctgaatcggcttccgacagaggtggtggacgctcgccacgcgcgtcttaaacgcgccatcgatctttccatgaagcacgagtacctccctgacaatcttcaggcaatgcatacaccattcaggggctaccttc

SEQ ID NO: 23004 - DNA, 282 bp, Glycine max
  Clone ID: 701102811H1
aatcactgcagcttctaatgttatcgatcaattctctttacaatctcagcctccgcaacttgttcatctctctcagctccacaatcaccaccaacaacaaaataatgtggtgtccactggccttcgcttatccttcgatgaccaacactttcaacaacaacaaagactccaacttcatcaaaatgaatctcaacaacataggtcccactcttctgctttcttatctctattatcccaaggcttgggttctcaaatcaaacaacagcgcgatgagattgatca

SEQ ID NO: 23005 - DNA, 277 bp, Glycine max
  Clone ID: 701102812H1
aatatgtccaaaattgaacacactcagcattgaagcaccgtttatggtttcacttgagttgaaaggatgtggtgtactatctgaagcattcattaattgtccactcctaacatctctcgatgcttccttttgcagccaactaacagatggttgcttgtctgcaacaactgtctcatgcccactgatcgaatcattgatattgatgtcatgctcttcaattggttcagatggtcttcgatctctgtattgtcttccaaatttgattgttcttgactta

SEQ ID NO: 23006 - DNA, 281 bp, Glycine max
  Clone ID: 701102814H1
atcgcaacgagattctccaagctctgcatccctcggcgatgccgtccacaacctactgtcttgaaggagaacaaattaaatctccttcaattatgaaacaggatgttgcacaagataacaccaactcatattcaaagaattcaatcccaccctacatgaaggctcatctctggctcacttggagggattatggaggcttcctgcctgcagcccattgatgtgatcaagaccagattgcagcttgataggtcagggaattacaagggaatactgcattgtgg

SEQ ID NO: 23007 - DNA, 257 bp, Glycine max
  Clone ID: 701102815H1
gtgcatatgctggattctcaatgatgaacatttagggtctatattttgaccctaggaaagttgcttcatgaagctttttcagttgtataagcaggatatggaccaccagtccgtaaaggatcttggctgctgatcctctcctttttatttccctccatggatgtaggtatatgcaagtggattcatgtaaactctcgctttgctatgtttgtgagttgtgacgaatatgttacttggtagacacaacagacatcacg

SEQ ID NO: 23008 - DNA, 288 bp, Glycine max
  Clone ID: 701102819H1
gggttcgaaggggaagaagaaaggttcaccggaagacattctggaaaccctaggagacttcacgagcaaagagaactgggacaagttcttcacccttcgcggtgattccttcgagtggtacgccgaatggcccaacctcagggacccactcctctccctcctcaaaaccgttcctctcccgcttcagctcctcgtccccggctgcggcaactcccgcctctccgagcacctctacgacgccggccacaccgccatcaccaacatcgacttctccaaggtcgtcatctc

SEQ ID NO: 23009 - DNA, 275 bp, Glycine max
  Clone ID: 701102820H1
cgcattgcacaagcactctctctttcccttaccctttttcaggtttcaacgctccaactatccatggcaaaccgctggctcagacccgaggtgtatccactgttcgctgcggttggtgctgctgttgggatctgtggattccaactggttcgttctatctgcatcaaccctgaagtcagggtgaacaaggagggaaggaaggcaggagttttggagaactttgctgagggagagaatatgccgagcattcctggcgacatatgtgcgcaacagaa

SEQ ID NO: 23010 - DNA, 280 bp, Glycine max
  Clone ID: 701102821H1
ataattcaattttgagcactaaccagcaccacttccaatggcttcaaatcatgaagaagtgatacttttgggcaagtgggccagcccatttagcaacagagtagaccttgctctcaagctcaagggagttccctacatatactcggaggaagatcttgctaacaagagtgctgatcttctcaggtacaaccccgtgcacaagaaggttccggttatggtccacaatgggtacccattacccgagtcacttatcagtgttgactacatcgatgagacatgg

SEQ ID NO: 23011 - DNA, 157 bp, Glycine max
  Clone ID: 701102822H1
ggttgagaaatgagaatcagaatccaaaacagaagccaccatctaaaaccccgcgtggtgaaaatccaaaaatgttcctgttccagaagggttctcatctccatcgtctccttctgtcaaagaagtactactaccattttccgcttccacacaacat

SEQ ID NO: 23012 - DNA, 277 bp, Glycine max
  unsure at all n locations
  Clone ID: 701102823H1
caggatttgaggtgctggagagaagggataaaagtgtatggtatgggggcgtggtgaccgagggctcgaaaggaggaaacttttggctacagaaagtagtttctttagtcgggtttctttcaaaaaatggtgcagagtctctgtttgatggcttctcatggttaccctcctggccttgtcttgcatccacaagtactgggcttgcctgcagtaccatgaagggctaccanacattctttccttctccagtagcaaaagcagacctgatcagatatca

SEQ ID NO: 23013 - DNA, 283 bp, Glycine max
  Clone ID: 701102824H1
caagaacattgactttggggttgatttagactctagggttgcactggttggacccaatggtgctgggaagagtacactactgaagctaatgacaggtgacttgatgcctagtgacggcatggtaaggcgtcataatcatcttcgaattgcacaatatcaccagcatttggcagaaaagctagacatggaaatgtctgctctacagtttatgattaaagaataccccggtaatgaggaagagaagatgaggggggcaattgggaagtttgggctgtcaggaaaa

SEQ ID NO: 23014 - DNA, 280 bp, Glycine max
  Clone ID: 701102825H1
caaagccttcctagaacgaaaaaaaaaagaagagcaattttccctcaccaaagaagaagaagcaaacaatggccgatcaacttaccgatgaacagatctccgagttcaaggaagccttcagcttgttcgacaaggacggcgatggttgcatcacaaccaaggagcttggaactgttatgcgttcattggggcaaaacccaactgaggcagagctccaggacatgatcaatgaagtggatgctgatgggaatggtaccattgacttccctgagttcctaaa

SEQ ID NO: 23015 - DNA, 277 bp, Glycine max
  Clone ID: 701102827H1
ccggaaatatcgaggttgtatttgttgcatgggggagaatataactcaacatttcgatccgggaaagatagattacatacacacacttaaatgtttctggttagatctcctgaaccttaagaacaatccataccaaaacgttaacatgttcgctttttttccttacacttctattgtcaaggcctgcaagtattaatgttaatatttaaagcctttttaagttttttttttgaataaattttaaccatggagttcctctatctccataatgcatgca

SEQ ID NO: 23016 - DNA, 277 bp, Glycine max
  Clone ID: 701102828H1
tctcaatctctcttcttacccatttcctccccccctctttctcttttcttgttctgtttttattttcactgttctctgataacaacgttgttagttgtcaccatggttgttctgtctcagccagcattaaaccagtttttccttctgaaaacatgcaagcccacgcccttgttcgcggggattcctgtggtcgacctcacggaccccgatgccaagacccacatagtcaatgcctgcagggacttcggcttcttcaagctcgtgaaccacggtgttc

SEQ ID NO: 23017 - DNA, 277 bp, Glycine max
  Clone ID: 701102829H1
ctcgagccggactagttctagatcgcgagcggccgccctttttgtttttttttttgatcggggaaaaacaagtcccaatttgcaaaaagctaggacccgaatatgatatatatgagatagggatgtaataggatatgaactgggaaatccggcaattttttaaaaatgggttaaattattgacctttgggttcctacattttaaaaaaaaaaaaaccgcaaaaaaaaaaaatcaatccaaataattaagaaaaaaagaagttaaaaagggggggggg

SEQ ID NO: 23018 - DNA, 236 bp, Glycine max
  Clone ID: 701102830H1
gcactggccactgagtatagcagttactctcgccctaagcccaggcccgctcctgcaggcttcaatcacgccgccggatccgggtatggtatgaagcaggagtcggaatacggatccgggtatggaaggacggaagaaggagaatatcgggtcaggatatggtggaagaaaggaggaatcagaatacggatccgggtatggaatgaaggaagaaggtgaatatgggtccgggtatg

SEQ ID NO: 23019 - DNA, 277 bp, Glycine max
  Clone ID: 701102831H1
ctcgagcgctttggcatgcccttcacaatgcagagataatctctccctcttccctctacatattcttcgcttttttccgaatagccataggtcaaaataatctgtgaacgacttcacctgacaaaatggctcaagccatatatactagaatagataataataataagcgaccgtcgagttactgttcaacagtgactattgtcgtgtttgtagctctttgcttgtctggcgtttggcagatgacatcgtcatctgttacgcccgtgcaaaatgtaga

SEQ ID NO: 23020 - DNA, 288 bp, Glycine max
  Clone ID: 701102807H1
tcagtgaaagagaatccgaggcgaagagaagagaaaaattaagatggaggggaaggagcaggatgtgtcgctgggagcgaacaagttcccggagagacagccgattgggacggcggcgcagagccaagacgacggcaaggactaccaggagccggcgccggcgccactttgacccgacggagtttacgtcatggtcctgttacagagcagggatagcagagtttgtggccacttttctgtatctatacatcactgtcttaaccgtcatgggagtcgtcggggctaagt

SEQ ID NO: 23021 - DNA, 274 bp, Glycine max
  Clone ID: 701102772H1
gcgtgttttgacatacacatctccatggccagcggaccatccaaagtcagatgaatattgttcagatccacggttggcagcatatgctgtaccatacaaacaagtagtttccggtaatgatgcggcgaaggattacttgcagaaacaagttacgctattgagaaccaagactcactggaggaaagcttacttttacttgtgggatgagccactgaatttggaacaatatgattctgttcgaaatatggccagtgagattcatgcttatgctcca

SEQ ID NO: 23022 - DNA, 275 bp, Glycine max
  Clone ID: 701102773H1
atcagcatcaggaggactgggagcaagcacaatatgcagcagcttttgagtgggaaggtttcaggtaattaaagccttcgtcactataccctccaacaacactctcgcgcgccgccgtagctagcctcgaacaagcttctcgcgcgccgccatagctagcctcgaacaagcctctcgcgcgccgccgtagctagcctcgaacaacacctctgaagaccttcctcagttactgaggtctcccttcctgagttcgcatcatcactcagctcccaccg

SEQ ID NO: 23023 - DNA, 272 bp, Glycine max
  Clone ID: 701102776H1
tttgtgcgcactggagctgagcagttgcagactgcgcggaagcaccagaagaataccaggacatggacctgctattgtatcttacttcttctggtgatcatcttgtttgtggtgctcttcactgtgaagccgtgggaaaatagcagtagtggcggcaatgggggtggtcagcctgcaccagctcaaacacctccatcaccttcacctcctgttaatgcttaaccttgggggactatgagtctatatttcacgaagcatattggtttcattta

SEQ ID NO: 23024 - DNA, 271 bp, Glycine max
  Clone ID: 701102777H1
tctgaggcctgtgcggtgctctgagaggaggggccatagtttgggaccctttgaaccctaatctccacccaaacccattttcccgggaagttccctctgaaacgaagacgaaaatgcagaatcacaggctgaagcagcagcaacaagctctgatgcagcaagctcttctccaacaacagtctctctaccaccctggtctccttgctcctcctcagattgaaccaattccaagtggaaatctgcctcctggttttgatccaagtacttgccg

SEQ ID NO: 23025 - DNA, 104 bp, Glycine max
  Clone ID: 701102778H1
catcttccggttatgcaatgtttccattgcatcaaaacggtaacattgcataaccaaaacataaattgtgagtaacaggagaaaaggaaattttatcagaattt

SEQ ID NO: 23026 - DNA, 215 bp, Glycine max
  Clone ID: 701102782H1
cgcctccgcgccgatgccggcggttccctccgccgtgatcggcccccagttctgcgcgccgtacccggtggatctggcggtggtgaagaaggtgatgaccatctctgacaacttcgttgtcaccgacgtcaacgggaacatcgtattcaaagttaagggatcgctcgcgaccctccgtgaccgccgcgtcctcctcgacggcgccgggaaccccc

SEQ ID NO: 23027 - DNA, 276 bp, Glycine max
  Clone ID: 701102783H1
attaactctttcttctcataactctgccgccgcaacagccccaaatccaatggcttcagagaagaaactttcgaacccaatgagggagataaaggtgcagaagctcgtcctcaatatctccgttggcgagagtggagatcgtctcaccagagccgctaaggttttggaacagcttagtggccaaacccctgtgttttccaaagcaaggtacacggttcgttcctttgggattagaagaaatgagaagattgcatgctatgtcactgtcagaggtga

SEQ ID NO: 23028 - DNA, 273 bp, Glycine max
  Clone ID: 701102785H1
ctcccctttgccgctgttgttgttgctgcaccaccgaacaacttcccctgtaaatcgcgtttcgtttgtgcaaggttttaaaagatggctgatgctgaggacattcaacctcttgttgttgataatggaactggaatggtcaaggctggttttgcaggtgatgatgctcctagggccgtgttccccagcattattgggagaccacgccatactggtgtaatggttgggatgggtcagaaggatgcttacgtgggtgatgaacccaatcaaaaa

SEQ ID NO: 23029 - DNA, 272 bp, Glycine max
  Clone ID: 701102786H1
gggaaggaagatgagctggcgcagggtattgaattcagcacaggccttggctgcacacactttccttttgtgcttcactctcttcctcgttctcacgatcgatcacaatctctcttcttcttggtgggtaatatttttacctctttggatgttccatggtgttgtggctcgaggaaggttttcattacctgcgccatctgctccacgtaatcgaaattgggctccatgccatgccgttgttgcaacaccattgcttattgcatttgaattgc

SEQ ID NO: 23030 - DNA, 275 bp, Glycine max
  Clone ID: 701102787H1
aatttctctctgtttccttcttcaccgcatcaatggagttggacggcgttctcctcggcatgtgcaaccctctcctcgacatctctgccgtcgtcgacgacgctttcttgcaaaaatacggtatcaagttgaacgatgcgattctcgctgaggataagcacaaacctatgtatgaagaattggctaacaatcctaatgtggagtacattgctggaggtgctactcagaattcaatcagggttgctcagtggatgcttcaagcaccaggtgccaca

SEQ ID NO: 23031 - DNA, 146 bp, Glycine max
  Clone ID: 701102788H1
aaaaaacacttagtaacagaaacacaatcacattcattcttgtctcaatggcaacagacagtagcacccatccacggcgatatcttagtcggccatattcctcgcacgcagccacttcatccaccttagtgcccgcctacctcacg

SEQ ID NO: 23032 - DNA, 269 bp, Glycine max
  Clone ID: 701102789H1
ctcagagctgaagtacctaaaaataacgattcctcggcggtgcaatcgttcgagtccaccgccatacacaccgaatcaatttcttcggagatcaatttccccttttccgttttggattttcttgcgttgcctaatttctcggcaaccaaacagcttctacaacttccatttccattccgttgattttgccgcatctccgatcatggaagctcctgacaactcagaagccaccgttccatataattctccaaaactagctggaacagtta

SEQ ID NO: 23033 - DNA, 267 bp, Glycine max
  Clone ID: 701102790H1
caaacactctgtaactctttattttattttctttctttctttctccgatcgcatagctcgctcgcaaccaccatgccttcccgaagaagaactctcttgaaggtcatcattctcggtgacagtggggtggggaagacatctttgatgaaccaatatgtgaataagaagtttagtaatcagtacaaggcaaccattggagcggattttttaaccatagaagtgcaattcgaagataggcttttcactttacagttttgggatacagct

SEQ ID NO: 23034 - DNA, 268 bp, Glycine max
  Clone ID: 701102791H1
ctcatcattctcatattattgtcgccacttcgacctcaatcaccctcgcgccctcgatcttcccttcctggtggcgacaatgtcgactcctgctaggaagaggctgatgagagacttcaagaggctgcaacaagacccgcctgcagggatcagcggtgccccccaggataacaacataatgctgtggaatgctgtcatatttggtcctgatgatactccatgggatggaggcacgttcaagttgactctccagtttactgaggattat

SEQ ID NO: 23035 - DNA, 263 bp, Glycine max
  Clone ID: 701102793H1
caacaacgtgatcggactcctgaacttcctgaccttcctcctctccatcccgatcctggtggccggagtgtggctgagcaagcagggcgccaccgagtgcgagcggtggctggagaagccggtgatcgcactcggcgtcttcctcatgctcgtctcactcgccggcctcgtcggcgcgtgctgtcgcgtgtcgtggctcctctggctctacctcctcgtcatgttcgtcctcatcgttcttctcttcgccttcagcatcttcg

SEQ ID NO: 23036 - DNA, 272 bp, Glycine max
  Clone ID: 701102794H1
agataacgcgatggttgacgtggactttggaacctcgggctcgccgaagcgccacaaccacaacggcttcatcgtaacaatctcggcgatcttggcgctgttaaaaaagcgcaaagcagcagtgaaggcgagcaaagaggatgaattgaagaagtcgtcgcggccgaagaagcttctcagcaacataagcagcaaagcgcttttcggtcacaagaagaatagcacgaagcagctgcgaaccgtggaagagacacaacaagcacacaggtggg

SEQ ID NO: 23037 - DNA, 266 bp, Glycine max
  Clone ID: 701102795H1
gggaaatgtacatggtcgtgttgatgcagctaaagctttattgattggatctcacatggtacatgcataggctaaaatcaaaagatctctcaatatgccacaatatgatcctactgggatcttgtataatgaagccgaatgctacaaactgaaatgatgcttgcgctgtgacatggcccaactttaccgatgtatacccttttgcaccgattgaccaaaactaaaggttatcagcatatctggtattaggaaatgttcaacaattt

SEQ ID NO: 23038 - DNA, 271 bp, Glycine max
  Clone ID: 701102796H1
ctgttccatgctgttaaagcctccgttcacactctcacaccgattcaatttcagattttcctgtcaaactcgcattttccgggcacgaaactcgaggaattcgcgcatggcgcctcccatcctctccctcgctcttccctcaaacaccggtcgagttctcagcattcaatctcacaccgttcaggggtatgttggtaataaatccgctgtcttccctctgcaattactgggatatgatgtggatccaattaattctgtgcagttttcgaat

SEQ ID NO: 23039 - DNA, 279 bp, Glycine max
  unsure at all n locations
  Clone ID: 701102801H1
agaatggaaacaactcttcatcgaagcaggattcaaacactacaaaatatttcccatctttggttttagatctctgattgaggtctatccttgaacatttttatgatgtgtatgtcacacttaacgtttatatttatgaacatcctcagacatcgttgtaattgtatttagtggtttgcgtgttgtttgctgaataaagctatgatgacatagcattatcaacttctggtggaattacttatgtcntccccgctatgttgttaatgttcgtgtaggatt

SEQ ID NO: 23040 - DNA, 290 bp, Glycine max
  Clone ID: 701102802H1
tagtctgcgcatgtgcttgatgcttgggctcccatgggccccaaggggccggttcgcgaggaggccgggaagatcttgacggccaatctcaaggggaggccggcgtttgaggccgacgatcagtccgccttgatatacttgctgctgtccaagaaggagaagtggatggacaggacgtttcttgagaattcgttctacttgcacggttattgggccgggttggttgatcggtatgaggagatgattgagaagtatcacccagggttgggggatgagaggtcggcgtttgt

SEQ ID NO: 23041 - DNA, 288 bp, Glycine max
  Clone ID: 701102803H1
gaaacatttcactaatagagagacataagcataatattgagaaataatggagggttgtacttattgtgtgaagttgctatgccttgttgggtttgtggtgcttgtgagtactattgcaggggtggagagtgctggtgaatgtgggaaatctaccaccccagataatgaggcttataagcttgcaccatgtgcctcagcagcacaagatgagaatgctagtgtttctcagagttgctgtgctcaggtgaagaaaattgggcagaacccaagctgcctctgtgcagttct

SEQ ID NO: 23042 - DNA, 280 bp, Glycine max
  Clone ID: 701102805H1
gctctctcactcacaaacacacactgaactaaaaaacatcaaaagagacatggctgagcaaaccttcatcatgatcaagcctgatggcgtccaaagaggccttattggcgagatcattagcagatttgagaagaaaggtttctacttgaaaggttagcaaattgttactgtggaccgtccttttgctgagaagcactatgctgatttgtctgccaagcctttctttagtggtttggtggattacattatctctggcccgttgttgccagatctgggaggg

SEQ ID NO: 23043 - DNA, 282 bp, Glycine max
  Clone ID: 701102806H1
tcagcactcaaatcctctgagagaaaaaaaaattagggttttgcatttcgggtcagacagactcagacatgggaggaggcaatgcccagaagtcaaagatggttcgtgagacaaacctcgtgaatcataggaccatggctagcgaacgccggttgactccattgtacgtgtgcatgactaattactagcaggcgcgtttgcccataagatcattcttgagataggtacttataagggtgatgatggcaaagctttcaatcctcaaagcgatcgccaggcaga

SEQ ID NO: 23044 - DNA, 276 bp, Glycine max
  Clone ID: 701102771H1
gctttgtttaggtgaactaattcggagaccttgcaagacttcatcaatggctgtcaaagtttatattgtgtactactccatgtatgggcatgttgagaaactagcagaagaaataaagaaaggggcttcctctgtggaaggtgttgaggccaagttatggcaggtacctgagacactgctggatgaggtgcttggtaagatgagtgcaccacccaagagtgacgtaccagtcattacccccaatgaactatccgaggctgatggctttgtattcgg

SEQ ID NO: 23045 - DNA, 275 bp, Glycine max
  Clone ID: 701102743H1
aagcaacaatcattgaattaattgcaccaaatattgttttgctgtaatcaatactccaatggggaatgcttggggggaaagaaaaccacaaaggtgatgaagattgatggggaaaccttcaagcttaaaaccccaataaaagtttgtgatgtgctaaaagaccaccctggccttgttctgttagaatccgaggctgtgaagcattatggtataagagcaaagcctttggaagcccacaaggaattgatgccgaagaggctttacttcctcgtgga

SEQ ID NO: 23046 - DNA, 274 bp, Glycine max
  Clone ID: 701102745H1
aaatatctgatgcaggtgtacaatcggtgagccttgacggaagcaaggacttggtgacagtgaagggaacaatggacgtgaaggagatggtgtcgtacctgaacgagaagctgaagcgaaacgtggaagtggtgcctcctccgaagaaagacgacgataagaaagagaaagaaggtgacggtggcgaaaagaaagagaaagagaaagacggtgccggtgagaagaaagagaaagacgttgctgcagcggcggaggttattaacaaaatggaata

SEQ ID NO: 23047 - DNA, 276 bp, Glycine max
  Clone ID: 701102746H1
ctcgagccgcacgtccgctccgtcatgagcgacattagggttctacgcaacatggacgacgacgaggtcttcaccttcgccaagaacatcgctgcgccttatgacctcgtcatgcagaccaagcagcttggccgcctccccgttgtccacttcgccgccggcggagtcgccacccccgccgacgccgcgctcatgatgcagctcggctgcgacggcgtcttcgtcggctccggcgttttcaagagcggcgatcccgcgaagccgccacggcgattg

SEQ ID NO: 23048 - DNA, 274 bp, Glycine max
  Clone ID: 701102747H1
cagctacaaaaatttcgtgaagaacttaagaatcgctcacgagtcttaaagaaacttggtcatattgatgctgatggtgtagttcagttgaagggacgagcagcctgcttgattgacacaggcgatgaactccttgtcgctgaattaatgtttaatggtacttttaatgaccttgaccatcatcaagttgctgcccttgcaagttgtttcataccaggagataagtcaactgagcagatacaattgagaacagagcttgctaggcctctgcaac

SEQ ID NO: 23049 - DNA, 279 bp, Glycine max
  Clone ID: 701102748H1
tgtgctctggaatggagttgcgcagatcagttagacaaatgtgttgttgcgtagaaaggaagctgtttcttttactttttcgatataacgtcaagtgacccaagtgccaccactttcgatccaagttcacattacatccaactccatctaggttcattggattctcaaaacccagcaaccactactgcatattcagattgttcgtttaaaaggaagcattggtcggtacttggtcgctacaaaaaatgccaattgttcagaaattgtatgatacctgca

SEQ ID NO: 23050 - DNA, 278 bp, Glycine max
  Clone ID: 701102749H1
atttcaacctctctttcttttcttctcgcagagcgaaatcccaatcccacacaaatggcatgctcagccacctctgcttctctcttctccgcaaaccccacacctctcttctctcccaaatcctccctctccctccctaacaactctctccacctcaaccctctccccacgcgcccttctctctccctcacgcgcccctcgcacactcgccgctccttcgtcgtcaaagcctcctccagcgagcttccgctagttggaaacacgcacggatttcgaag

SEQ ID NO: 23051 - DNA, 93 bp, Glycine max
  Clone ID: 701102751H1
ccgacgccgactggggagccggctcacttcggctcagacttccgggtggacatgatgacattgcgcggtccgtcggcggggtcgccttcagcg

SEQ ID NO: 23052 - DNA, 278 bp, Glycine max
  Clone ID: 701102752H1
ctctgttctaacgcggggtgcgggaggcccgagacgaggaagcacgagtttcgaaggtgttctgtgtgcggcgaggtgaattattgctcacgcgcgtgccaagcgcttgattggaagttccggcacaaagcggagtgcgcccccgtggagcgatggctcgacgaggacggcgaagatgtcggtaacgacgacggtgacggagaggtcgaggttgttatggtagatagttagacaatttttacaacagtaacggcaacggaagtcgctttggacggaaa

SEQ ID NO: 23053 - DNA, 279 bp, Glycine max
  Clone ID: 701102753H1
ctccaggacaattcccttcacccaacctaattggtacttgttggttgatctaccttgcaccttgagatagtaaagttgcaaactttgaagcaattagtgtagaagatgagtacgttggatgcaacaagggctgaacttggtcttcttgttttatatttgggcaaagctgaagccagggacaaaatatgcagggacatacaatatggttcccgatttttgagtaacggggaacctgggactactcagaatgtcgacaagacgaccaatctcgctcgaaaa

SEQ ID NO: 23054 - DNA, 272 bp, Glycine max
  Clone ID: 701102754H1
tttgttttgtgtgagttttttttaccctccccgtacatcaagagagaaaaagatgacgactaatttagaatttaacaagaagataaactcaaaaactactaaaataatttaattttaactttaacgtagtaatcatgttttgtttgtgtttagaaaattggaagtggggaagggctaagaaggttgttggcattattagtgcattgtgattgtgcacgttggtgtttatgacatttatttagaggataggtttggtcggtgaatcttttggg

SEQ ID NO: 23055 - DNA, 278 bp, Glycine max
  Clone ID: 701102755H1
tgggacttttctttctttctccccacacccagattcaaaaactcacctctgctctttcgtttggatctcaaaacatgttcttcttcgattggttctatggcattctagcttccctcggtctctggcagaaagaagccaaaattctcttcctcggtctcgataatgcagggaagaccaccctccttcacatgctcaaagacgagagattagttcagcaccagccgacccaacaccccacttcggaggaattgagcattgggaagatcaagtttaaggct

SEQ ID NO: 23056 - DNA, 282 bp, Glycine max
  Clone ID: 701102756H1
ctcgagccgaaaagcatggccccttattctctctctccttcggctccatgccaaccgtcgttccctccacccctgagttgttcaagctcttcctccaaacccacgagacaacttccttcaacacaaggttccaaacatctgccataagacgcctacacttacgacaactctgtggccatggttccattcggaccttactggaagttcgtgaggaagctcatcatgaacgaccttctcaacgccaccaccgtcaacaagctcaggcctttgaggacccaacaa

SEQ ID NO: 23057 - DNA, 276 bp, Glycine max
  Clone ID: 701102757H1
gccgtggcgcgcctctcgctaaggtcgccttccgccacccgttccgctacaagaagcagaacgagctcttcatcgccgccgagggtctctacaccggccagttcatctactgcggcaagaaggccaccctcgttgtcggcaatgtgttgcctcttcgatccattcctgaaggagctgtcatctgcaacgtcgagcaccatgtcggcgaccgcggcgtcttcgctagggcgtctggagactacgccattgttatcagtcacaaccctgataatgaca

SEQ ID NO: 23058 - DNA, 272 bp, Glycine max
  Clone ID: 701102758H1
gcggaactcatgctcgaacaccccaactattttttggtcaattctcgttctttgcatataggaagaagattctctgctctcggtgctgatgaagagttggagttcggcaacgtgtatatcttcttcccgatgaggagagtgaactctcttgtcaccgcccctgacatggcagtactcttcttggccgccaactctgccgccaaaagattgtccggcagtaaggcgcgtgttctgccggacaactgtggcggtaaagcatggcaacaacggga

SEQ ID NO: 23059 - DNA, 116 bp, Glycine max
  Clone ID: 701102759H1
tccaattcttctcttcccaatctgggttttctctataacccttcatggttaactctttttccatttgggtctctctctcctccttcggatctgcttctgattccacataaaataaa

SEQ ID NO: 23060 - DNA, 275 bp, Glycine max
  Clone ID: 701102760H1
gtcactgccggaagaagggagcaacaccatctttcattttccggcgatctcttgtttcttccatcatcaccgttttccggcgatccctaatcctcgcaaacagaaatgacgacatcaaggcgccttgcggacaggaaggtggagaagtttgagaagaacatcacaaaaagaggatttgtgccagacactaccactaagaagggaaaagactaccctgttggcccagtgctgctcggtttcttcgtctttgttgtcattggatcatctctcttcca

SEQ ID NO: 23061 - DNA, 268 bp, Glycine max
  Clone ID: 701102761H1
gaaagaaaaccctagcttaccttttcaactttcaagatgcaaatctttgttaagacactcactggtaagacaatcacccttgaggtggagagttcagataccatagataatgtaaagtccaagattcaagacaaggaagggatcccaccagaccagcaacgtctcatttttgctggcaagcagcttgaggatggacgtacacttgctgattacaacattcaaaaggagtccactctacacttggtgctccgtctccgtggtggaatgc

SEQ ID NO: 23062 - DNA, 222 bp, Glycine max
  Clone ID: 701102764H1
ctcgagtcgttctcgatgaaaccctaagcttccactttcaatctcatcagatcctttcgtggctcgcgcgaaaccctaattttgaatctgcaaaaatgtctgcagttatggatatgtcgctcgatgatataatcaagaccaacaaaaaatctggatccggaagttcccgtgtgcggatacagacctcccggttccggaccttatcagcggttccccaaccgt

SEQ ID NO: 23063 - DNA, 276 bp, Glycine max
  Clone ID: 701102765H1
cgtgtattggctctttgaaattggagctgggatctgtgacatgtttgggcgctgattgacttgcttggatgttgtttcttggtggggtttgtcctggcaatgggagctttatatagaagcagcatgatgagaggagcagcagccctgtgcagctttccaagtttttagggcgtgacaaagatgacggtgtccgtcgcagtgctgtatctggcaagaagattcttctgaaacttgagactacaaaggaagataaagtggctgaaagccagagaaacg

SEQ ID NO: 23064 - DNA, 262 bp, Glycine max
  Clone ID: 701102767H1
caaattctttgagttgaacacaggggccaagattccttctcttgggttagggacttggcaagctgaacctggtgttgtagctgaagctctcaccacagccattcaggttggatacaggcatattgactgtgctagtgcgtataagaatcaagcagagattggttctgctcttaagaagctttttgatgatggtgtggtgaagcgtgaggacttatggatcacttccaaactctggtgttcagatcatgcaccagaagatgtg

SEQ ID NO: 23065 - DNA, 274 bp, Glycine max
  Clone ID: 701102768H1
agcccgtggagaagtgtttgcgggatgctaagatggacaagagcaccgtccatgatgttgttcttgtcggtggttctactaggattcccaaggttcaacagttgttgcaggacttcttcaacggaaaggagctttgcaagagcattaacccagatgaagctgtaccctatggtgcagcagtgcaggctgccattctcagtggcgagggtaatgagaaagtgcaggatcttctgttgttggatgttactcctctctcccttgggttggagaccgc

SEQ ID NO: 23066 - DNA, 205 bp, Glycine max
  Clone ID: 701102769H1
cattgttgtaactttttgattcctaaattctctaaaattcgaaattctaatttcgttatgggaaagacattgtttgtctctgagtgagtctggctggcaaaggcgacggtcgtgctatcggtgtcgatttgggcgactacgtagtcctgcgtcggggttccgcaacatgggcgccgtgaagtcattgccagcgatcatggtcgtc

SEQ ID NO: 23067 - DNA, 262 bp, Glycine max
  Clone ID: 701102770H1
ccaaaagccaagttaattccctttctccactcttcacaaacacaaacacacgtattctcttgcaaaactaagaatgaaggaggagttggtggttgaagaagggtaccttttcaaagaagagactcacttcacagtgcgcaaaacctctctcttcttcaacggtgatggcttcgctgtctacgattgcaaaggccaactcgttttccgcttcgactcctacggtccccgcgcgcgtgacaaggacgagctcgttctcatggat

SEQ ID NO: 23068 - DNA, 276 bp, Glycine max
  Clone ID: 701102742H1
gccgaagaacaagggaaagggaggtaagaacaggaagaggggaaagaacgaggcggacgacgagaagcgggagctggtgttcaaggaggacgggcaggagtacgcgcaggtgctccggatgctggggaacgggcggtgcgaggcgatgtgcatcgacgggacgaagaggctctgccacatccgcgggaagatgcacaagaaggtgtggatcgccgccggagacatcatcctggttggactcagggactaccaggacgacaaggctgacgtcatcct

SEQ ID NO: 23069 - DNA, 278 bp, Glycine max
  Clone ID: 701102718H1
ctgagatactaaaaggttgtgggctacatgctgatattggaataacagttctgatagatcgtagcgtcttaaaagttgaaaagaacaacaaacttggaatgcatcaattgctacgggacatgggaagagagataatctgtgaaagttcaagaaaggaaccagggaaacggagtcgatagtggcttcatgatgatgtacttgatgtattgacaaataatactgggacagtggctattgacgggatggctctgaaattgcatttcgccggtagagcttgc

SEQ ID NO: 23070 - DNA, 284 bp, Glycine max
  Clone ID: 701102719H1
ctttgcttcagctatggagtttcgttgccttccattggttttctacctcaatctgatcctgctgacagctcatgctgccatacctccagaagtttactgggaaaggatgcttccaaataccccaatgcccaaagcaatcatagactttctaaaccttgatcaacttcctctttggtatggtgctaaggaaacccaatctacagatcaaatattcctgtatgatgctaagaaaacccaatcaacagatcaagttcctcctatcttttatggtgataagaaaaccc

SEQ ID NO: 23071 - DNA, 283 bp, Glycine max
  Clone ID: 701102720H1
gcgtctcttacgtacttgccaaagaggaacaaaagtgtttgactgttgatagcatcatcaagaagaagttgtaaagatgttagggctatttgacaagagccacaagatcaagggcactgtggtgttgatgcccaaaagtgtcttggacattaacgacttgaattcagtcaaaaatggcggagttggtggcgttgtctctggtatctttggcgccgtcgccgacgtaaccggccaaatagttgatactgcaactgccatcttttcccggaacgtctccttcaag

SEQ ID NO: 23072 - DNA, 283 bp, Glycine max
  Clone ID: 701102721H1
ctcgagccgctcgagccggcaaattctcgttcgggctcgacccgggttgtctcctaccgaatctcccagtctcggacctcgccgtcgcgtttgacctggcctcaaagctctccgccgaacgcgccatgaacgcgtcgccgtttatttggaaactaaaacgactcctcaacataggatccgagaagaaactgagagaaacaattaacgtcgtaaacgacgtcgcaaaagagatgataaagcagagaagagaaatggggttccagacgcggaacgaccttctctc

SEQ ID NO: 23073 - DNA, 276 bp, Glycine max
  Clone ID: 701102722H1
tttgggagttaggttctgcacgctctgcttccagcgagtgttctttcttcgtttcaacaccttaatttgcacacgctgcttcttcagcttgagaaatggcacaagaaacctttctattcacatctgaatctgtaaacgagggtcaccccgacaagctgtgcgaccagatctctgatgcagtgctcgatgcgtgccttgaacaggaccctgacagcaaggttgcctgtgagacatgcaccaagaccaactggtcatggtctttggagagatcacaac

SEQ ID NO: 23074 - DNA, 283 bp, Glycine max
  Clone ID: 701102723H1
aaactcttctctctcttcatctttctctgttcctcacaattcactacatcctacaaatatattcaaggtcccatttttctcatctgggtcatcaacttaatcatctctctcttgttctctatccaattaattgcttttccctctgagtttctctccaccttgttgttgttgcaacttgatttcatggttgcaaaatgaagtgtttcttctttaaggagaagagcaaatccgccccggaactgcacaagaagaaaacccccgccgtgaaccgcgccgcaaactc

SEQ ID NO: 23075 - DNA, 219 bp, Glycine max
  unsure at all n locations
  Clone ID: 701102725H1
ttataaagatatcatactttttcatagtagtgtgtgtctatgggtttacgtcaattgntcgtatactccatttttctgtctttagtaattgtttttctgctttgtgtttctcattattttatataaatttcattcatttttattttctttgtatttttttatttttgtttttgtgtggatgcagtggctttcgtctcttctctgcttcctttccctgac

SEQ ID NO: 23076 - DNA, 279 bp, Glycine max
  Clone ID: 701102726H1
caagtctttctctcctttcttctccttctcgcactgccatttgaaacccctgacccgaatcgtttcctttctcctcatcctctgcctcagtctcccaggatccaatataaatggaaatggaagcttcaaaatttatggctacaacgaactgaagcctctatcagacttagcttgcccgggttagtggaagaatttggggtgaagtaaagtgaaaaattgccttacgttagaaacgtgatcaagttccatggaagaagagcatcaatgttctggaagtgg

SEQ ID NO: 23077 - DNA, 277 bp, Glycine max
  Clone ID: 701102727H1
atcctaagtctttgggaatagtgctgcaatggcttcaagtcaggaggaggtgaccttttgggagctaactggaagcccatttgtgtgcagggttcatattgccctcaagttgaagggagttcaatacaaatatgtcgaagaaaatttgaggaacaagagtgaactgcttctcaaatccaacccagttcacaagaaggttccagtgtttattcacaatgagaagcccatagcagagtctcttgtgattgttgaatacattgatgagacatggaagaac

SEQ ID NO: 23078 - DNA, 278 bp, Glycine max
  Clone ID: 701102728H1
tgtgaaaatggcggtacccttgctctccaagaagatcgtgaagaagcgcgtcaagaagtttatacgcccccagagtgatcgcaagatctccgtcaagccaagctggcgcagacccaagggtattgattctcgtgtcaggagaaagttcaaaggatgcactttgatgcccaacattggttatggctcagacaagaaaacccgccattatctaccaaatggtttcaagaaatttgtcgtgcacaatgtgaaagacctggaacttctcatgatgcataaca

SEQ ID NO: 23079 - DNA, 275 bp, Glycine max
  Clone ID: 701102729H1
caagaatgactttgaccttggcctcaatgctcttgattatgaggtctggcttggtgatgttagcattggaggagcagaacttgccaaatctgcaaagctcgtgaaaagtgggattagtgacattgatgttccaattaccttcaggcctaaggattttggctctgctctttgggacatgattagaggaagggggacaggctacacttttaaaggacatattgatgttgacactccctttggagcaatgaaactgcccatcacgaaagaaggtggta

SEQ ID NO: 23080 - DNA, 280 bp, Glycine max
  unsure at all n locations
  Clone ID: 701102730H1
agaacacttaccttaatttcgccaaatcaaccaaagacaaaaaaaaaagaatccaaaggaacagaagagaaagcttgaagctatggggaacaccatgggaaggagtaaaaaggccaaggtgatgaaggtggatggagagacgttgaagctgaaaacaccagcgagagcaaacgacgtcgtaaaggactacccgggccacgtgcttctggactccgaagcggtgaaacattccgnggttcgggccaaacctcttgagccgtaccaggaactgaagcccaca

SEQ ID NO: 23081 - DNA, 276 bp, Glycine max
  unsure at all n locations
  Clone ID: 701102731H1
gagagatccatccttacaactaaaactatgtctcactctctacattcacatttcacacacacaaaaaactcaaagaaatganncttttgnccttctctctcggncttcatcttcttcttctcctttgactcaacaaccctccctctctctctttcacacagagagatactttctctctctacactgcaatggacgccggcgaagcctctccgacgattcgaatcggcccaattccgccgccgacgcagcttcggcccccgcgggagcaaggtacaa

SEQ ID NO: 23082 - DNA, 280 bp, Glycine max
  Clone ID: 701102732H1
ctgctcttcttgatttggcttccccggatagttttggcagattgcatgacaggggaaaggaggccccaaagccaaacaaaaccttaactaagcttttcccaaataaagtgacaattcacatgccacaggatgagacacttctagcatcttggaagcaacaactcgatcgagatgttgagactcttaaaattaaaggaaatttgcacaacttacgcacagttttgagccgatgtggggtggaatgtgaaggactagagaccttgtgcattaaggatcagac

SEQ ID NO: 23083 - DNA, 282 bp, Glycine max
  Clone ID: 701102733H1
cttatcatggcttctcacaacatcaaaatccacgaccacttaaggctttcccctccctcagcaacagaaatatccctctctctcactttcttcgacctgttctggctcaggttccaccccgtggaacgcatcttcttctacaccctccctacaccccattcaaatccatccattttctattccaaacttgttccaaagctcaaaacatctctctctcgcactctccaacacttcccccctctcgccggcaacgtcgtttggcctgataacacccaaacccca

SEQ ID NO: 23084 - DNA, 282 bp, Glycine max
  Clone ID: 701102734H1
atcttatcttatccctctaatcactctagctgttgcaaatttctactatttttcaatggcttctgcagatgttgagttccgttgctttgttggtgggcttgcttgggtcaccggcaacgatgccctcgagaaagccttttcaatctacggcgacatcgttgaatcgaaggttatcaacgaccgtgagactggaaggtccagaggattcggatttgtgaccttcgcctcagagcagtcaatgaaagatgcgatcgcaggaatgaacggccaggaccttgacgg

SEQ ID NO: 23085 - DNA, 282 bp, Glycine max
  Clone ID: 701102735H1
gatcgatctggtagaaacgatgaaggaactatgggcacaaatggggtcactaatggccactattgtgttcatgtacacaatctttgagcgcttcttccctccacacttgcgtgaaaaacttcaagcctatactcaaaaactcaccaaccatttcaacccttacatccaaataagcttccctgagttctcaggggaacgactgaagaagagtgaagcatacacagccatccaaacctacctgagtgcaaactcatcccagagagccaaaaggctcaaagctga

SEQ ID NO: 23086 - DNA, 279 bp, Glycine max
  Clone ID: 701102737H1
gaaattaccagttactatactctctctttctgaaacaatttgcccaattgtttgagtggcttttgccaggatggtactcttatccagtattttggtcttggatcagaaacaagaggaaccgccactgatattccagacccttttggaattgaagttggaaacccttcagaaattccatatggatatgatgataaatggttgatcaacgtgcatgccattgacacaaggggcgtggaagataggttagggtgcattgagtgtaggtgtgacctttataat

SEQ ID NO: 23087 - DNA, 267 bp, Glycine max
  Clone ID: 701102738H1
ccttaagttacataacagttgtttcagttcctaatggcaaaacgtatcaacactttggaaaaaagataaaggggtttaacattcctgtcctataatgcaatgccattatagaattacttgcctgcctgaattgaaaaggtggagattgttaagattataacatttgttattcttttttttttttcctatattgacatactgtacaatcacataatttcattgtgtcgttgctcatttgtatttgttatcaggcagagggtttttggc

SEQ ID NO: 23088 - DNA, 280 bp, Glycine max
  Clone ID: 701102739H1
ctgtatactattgtgtttgcttgcaacttttgggtatatagttttgcaagtttcaactgttagctcttcctagcttttgctacaaacgctgattgaccacttttctatgcttgatttgtgtgattgttttgtctatttagcttgtctattattaaataacacaagggtatggatgctgctgcaagtcaaagtctctatccattgcaccgttgcaaaactgttcacctggttaggcatgcgcaaggagttcataatgtagcaggagagaaaaaccatgatg

SEQ ID NO: 23089 - DNA, 274 bp, Glycine max
  Clone ID: 701102740H1
cgggttgaaacgaaacttatcttgggaagctgcaacgagcgaagagcagagaaatggtggttgggcagcttgttccttcgaatttgttcctgaatcgttctgctgcgaccagacacagacaccttctttgtgtttctgcaaatgacacaacctcaaccaataacacggataacggttctccattctcaagtttcggaagactcaaggcccagaaagtgaagactctcctggtccacagaagaggaaaggaccaaagccatagacgccccgttca

SEQ ID NO: 23090 - DNA, 279 bp, Glycine max
  Clone ID: 701102741H1
ctcagataaaagctttgtatgatgcaaaattcaattttaaaacaacaaggctttccaagaaaaagagttatcttgttcaaattgaaattattgcaactctttccaatcctcacaatagaaagaaagagtttcttattagttataacatttattgattattgactataaaaaaaatatgtaaagtttttttttggaaggcaaaattaagaatattattaataaactaaacagtaccaggggtactgaagatagcaattacaaggcactaggtgccacctt

SEQ ID NO: 23091 - DNA, 279 bp, Glycine max
  Clone ID: 701102717H1
cgcaccgtagcagaaaaaggaggtgatgagagagtgcgggctgtgggagacatgctgagattactcgcggagaggctgaggatccggttcgagttcaaaatcgtcgcgactcagaaaatcgccgagttgactcgtgagtcgctgggatgcgatgcggacgatgttctcatggtgaacttcgcgttcaagctgaagaagattccggacgagagcgtctccccggaaaaccctcgggacgagcgtcttcggcgcgtgaagagactcggccgcgcgttgtga

SEQ ID NO: 23092 - DNA, 207 bp, Glycine max
  Clone ID: 701102675H1
gccaccacctccgcattcctcctccttcccctcctcctgctgctccacctcgccatcgccgctcacggcatcggcatcaactacggcacgctcggcgacaaccttccaccgcccgcggcggtgaccgaacttcctgaagacgaagacgaccatcgaccgcgtgaagatctacgacgtgaacccggacatcctgcgggccttcgccgg

SEQ ID NO: 23093 - DNA, 202 bp, Glycine max
  Clone ID: 701102676H1
ctcgagccgctcgagccgattcggctcgaggggggttataactcctttgtcagaacagctaccaaagccactacccaatgccatggttctagtaaaccttaaggaaatatcttccagagcttataagcttttgccacaaggcacacgcttggttgtgtctgtacgaggtgatgagccttatgaagaactggacattcttaaa

SEQ ID NO: 23094 - DNA, 204 bp, Glycine max
  Clone ID: 701102678H1
tcttcttcccaaccactactactcactcactgcagatctcaattgcatcgctgtccatggctaccatcgttagcatcaaggcccgccagatcttcgacagtcgtggcaatccaactgtcgaggtggatttgacttgctccgatggtacttttgccagagctgctgttccaagtggtgcatccactgggatttatgaggcccttg

SEQ ID NO: 23095 - DNA, 208 bp, Glycine max
  Clone ID: 701102679H1
aggagatagtgaaagagcttcttcctctaattcgagtgtacaaggatggcagcgtggagcgtcttctaagctctgaaaacgtggcagcctcccctgaagatccccaaactggagtctcatccaaagacatagtcatcgcagacaacccctacgtctccgctcgcattttccttcccaaatcccaccacactaacaacaaactccccat

SEQ ID NO: 23096 - DNA, 206 bp, Glycine max
  Clone ID: 701102680H1
caattttcatctcccgtggtgtttggttcctcttaaattctaaactaatctagttagcttctttttttctttctctcctcaaattgtgtgtgcaacaaaaattttgtagaatggaggaacttcaagggtctcaaacccaatcatcgctcggtcaagaagatgaaaatgaagtgattactgaaagttcagcatttgttaaaggggaa

SEQ ID NO: 23097 - DNA, 214 bp, Glycine max
  Clone ID: 701102681H1
ctcgaactctcattcgccatttcctcacctccttcaaccgctgctaaattctagggttccgaaatggacgctggcggaaagatcaagaagggcgccggaggtagaaagggcggcggcccaaagaagaagccggtttcaaggtccgtcaaagccggtctccaattccccgtcggaagaattggccgttatttgaagaaaggaaggtacgctcagc

SEQ ID NO: 23098 - DNA, 195 bp, Glycine max
  Clone ID: 701102684H1
aaaaagctcaaatatctttaccaataggcgacataactttgtgtaacgataacaaaatagcaccgtttgtttgtgtttttgccatggttcccaaaactgtagcgaaaaccatcacaacctggtggtggattggttcgatctgcgtcttcctctgctaaactgcgtacttcataaccccccaaaagagaatttttt

SEQ ID NO: 23099 - DNA, 202 bp, Glycine max
  Clone ID: 701102688H1
aaagaggatgtgatggatgatgaggaagaagatgaatttggcttgtctgatatggtgctttcagatgacttctttgaaagtttggatgaactgagccaacttacggctccttctgttgtcactggagactgtttcagtgaccccttttcagcaattgcaatcccttcttgggtggctagtggtgctgctactgctagtgggt

SEQ ID NO: 23100 - DNA, 179 bp, Glycine max
  Clone ID: 701102689H1
tcgcaattcgactcaagcttcattttgttgttcgaacccaaaaccctagcagccggctagaatcgcagacgttcacgttgatgccgcagcacgggcacaggcagcacaccgaagaagagaacgttcaagaggttcagcttcatgcgcgtggatctcgacgcgcttctggacatgtccac

SEQ ID NO: 23101 - DNA, 202 bp, Glycine max
  Clone ID: 701102690H1
tttggagtttagtcccttatttttaactactgccatggaaggcaaccactgtttgatcatttcttcagatgagtatagaattggctgaaggttaggaagtgaagatagagcctggtattttgtatcttcagtgttctttgtcatcgtctcatatagttctatagttctagctgattttgattttataattagcttggttcct

SEQ ID NO: 23102 - DNA, 203 bp, Glycine max
  Clone ID: 701102691H1
cgtggctctgccaacatggatgtgctcattgcgctgggaacaaacgcagcgtatttttactctgtttactctgttttgagagctgccacctctccgcatttcgaggggaatgatttctttgagacgagtgcgatgcttatttcgttcattctgcttgggaagtatcttgagattctggccaaggggatgacttctgatgcgat

SEQ ID NO: 23103 - DNA, 207 bp, Glycine max
  Clone ID: 701102693H1
cctcgagccgaatcggctcgaggttgatattgtcattggcacaccaacgccgtgtgaaggatactattgagaagggaaataacgacctgagccaactaaagtttcgtgtccttgatgaagccgatgaaatgctgaggatgggttttgttgaagatgttgaaatgattctaggcaaggtagaaaatgttaataaagttcagacacttc

SEQ ID NO: 23104 - DNA, 207 bp, Glycine max
  Clone ID: 701102694H1
tggccaccggtggcgatttgtgggtcagagttggcggcggacgagagattggtggcggtttcagccacgagagcgagcatgatttggcgctcatggttagcgattttttagaaaatggaagtagtggcgcagagtcttggtgtagcagtgatagcgatactggacattctgatttcgctcaactcgccgagaggattcagatctgta

SEQ ID NO: 23105 - DNA, 201 bp, Glycine max
  Clone ID: 701102695H1
ctcgagccgctcagcctccaccacgctctcctctcccttccttcgactggaattaccctccagaacaaagaaacgatcttcatcaattattcctgttccctccatccgagcctccgtctccgagaaaccaccgctaccggctgtgtcggttacctcccctgagccaagcaagctccccatccgcaaaatccccggcgactg

SEQ ID NO: 23106 - DNA, 213 bp, Glycine max
  Clone ID: 701102696H1
ggagcacataataaccctcaaactccatttcactcacagaaaaatagagatatagagagagaaagtgctgcagaatacacacatacacaccacttcttcaagagagagaggtgtgtgaaggaaaataagaactgaaagacaaattttgcaaaggaagatatgaaactttgcaaatttaacaactgagaaagaagatctgtgatttctctctct

SEQ ID NO: 23107 - DNA, 287 bp, Glycine max
  Clone ID: 701102701H1
gccctcttggagccaccaatgctagaagcaactaagcctaagcactttgttggggagagtagtactagcactacgaaagtaaccaagcacttcgaaaacgagaagaatccttcgaagctagaggtgctgcctctgtcagaagggcctagggatgtttttcagtttcaagctagactttggcaagctgttaccaaagctgtgaagaagatcaagcgaaaaaatgggccccatagaggagaggatttcaccttgtcacaggcaatggccaaggctgatttttgggtcat

SEQ ID NO: 23108 - DNA, 250 bp, Glycine max
  Clone ID: 701102702H1
ttcggctcgaactcgagccgaatcggctcgaggaagaagctttgactaaccatttacattgcttgaggctctcgtttaacaagctacaagggcaaggatctgtttagaaatttccaatatccgattagtagtttagtagtgtctttctgatctgtagggtgtagggggggtatatggtatatctagtttctaagtcatctttaatgtaatttcattaccttctgtttatataattcagcggggattagac

SEQ ID NO: 23109 - DNA, 282 bp, Glycine max
  Clone ID: 701102703H1
gccagtggcctggtacaattgatcaatcatggagtgatgcagttcctcaacctattccagcagtacctggtgtcaactggggggcacctgcagaagcacctgctgctgcaggaggagattggggggaagctgttccaccaccacaacaaatccctgtacctccctctggaattgatactgtccaaccatctggctgggattaaactagtgacttttgatgctatgattttgccccgtccctcaattttagcttacctgtctttctttgaagtaaaatatgga

SEQ ID NO: 23110 - DNA, 283 bp, Glycine max
  Clone ID: 701102704H1
aagaaattgatatattcccataattaatttgaaagaagatggaagtggtggtacaaagtcctagtagtccaaacatggatactttcgattttggtggcaacatgggttcgatctttcaaagtgttccttcttcaccaaaagggtttggtaattactacctaagcgcaccggcgagtccatctaggatgtctgaattatacaccgaatttgaatattattcttcggcttcaccctcttcattcgaagcaggcaacaaaattgatgatgacgatgaagacgaaaa

SEQ ID NO: 23111 - DNA, 286 bp, Glycine max
  Clone ID: 701102705H1
caacaacaaaaaaaagtaaagaatttgctttgcgaggaagtaagtaggagatgctctgaactttcaaatttgtacaacccctaggaagagaagaagaaggttcaaaatccaatccatttttcatttcgaaagatcgtgatcgcaatgtccctctccaccgtgaggcagcggcgctcggagccgtctgatccgtcgccatcagaaccgtacacgaagctggacaagcccgagaaagcggaggagaaagacgaagggttggggtgggttttcccgttcgtggctcttg

SEQ ID NO: 23112 - DNA, 280 bp, Glycine max
  Clone ID: 701102706H1
cctctctgagattttgctccaaaaccttccccttcatctgatttgcagagactaacccaagaaaggaccaaccataaccaagtgctttcttggagcttggtagagagagaaagtcccactttctctctcttctcttttttctttctgtgtgtgttgtgtgcgtgcgtgcgtctgagggtacatgcaaaacagtgagtctgagatagcgaaagaaggagttcaagattgttgtccaattttgcaaaaactgcccatcaagtacttttgttgtttttttttt

SEQ ID NO: 23113 - DNA, 283 bp, Glycine max
  Clone ID: 701102708H1
aagaaaatcacattacctgtctctgaaatcagattcactttgttcttcatcaatggaaagagaacaactatcccttcacatgaatggtggcaagggacaaaggagttatgcaaacaactcctcactacaaagaacaataatacgtaaaaccagatccatacttgaagaaactataacgaggttgtactgtgatacttttcctaataattgcttaaaagtggcagacttgggttgctctgtaggatcaaacacacttcttgtgacatcaaatattatcgacatt

SEQ ID NO: 23114 - DNA, 280 bp, Glycine max
  Clone ID: 701102711H1
tggaagtaaagatcgttctgctgactttgaaggtgagaactccaggagcaagctttcaaggcacaattttgaggccaacaaggagtacccagatgaaaaaggtgttgaatttctgagggattcatcagaagtgggtggttgtggtggcagctcagggttgcaagagttgaccctcagctacctttgtgacaacccaaaattcaatcttgctgagaaagagattcctggtaaaagcttgttggagaaaatgagccacaaaggtaaagaggttgtggtatgt

SEQ ID NO: 23115 - DNA, 277 bp, Glycine max
  Clone ID: 701102712H1
cacaacagtttcctcgattggttgatctgctttctgggccatgttggtgtcgatgaggaggatcatgttcagaggcatccacagtgagttgtagaatagaagcaaaaagagaagttcttggtggcgatttcttagatgggtcttcttctgtgggtgtgagtgggtgtgagttttgactgtgttggaaaaagaaggctttttttttttttcttttcaatgttatgagaggcattattcttggtgggttttgtgaggggtggctttgatttgcctggat

SEQ ID NO: 23116 - DNA, 278 bp, Glycine max
  Clone ID: 701102713H1
gttaattctctgtctgatagatttgtattttgagtgatatttgggtacgtgtaggagtgaaccttcctttaggaaacaaatgagtgttagagatgtcatgttaactagtgatatgagatgaattgtaagatggtatcacagcctatcataatgatagttgttgggctcattgtgctatccaccatcactaaatgtctagtcttgcaaactttatgcccaagatgttctgactctgcatgatgggtgatctgaccaacatagagcatagaagttggtgg

SEQ ID NO: 23117 - DNA, 204 bp, Glycine max
  Clone ID: 701102674H1
cagaaaatggcatccgccgccgccagatctatattccgatcatgctccgcccccaggtcagcgtttcgcgtcgcatcggaagccaaaccggttcgttctccgttccgcatcgcgtccaataagcctctctcgcagtcccaatccactctcaggttccctgtggaattgagttcgtgtgtggaatcgatgatgccgtaccacacg

SEQ ID NO: 23118 - DNA, 278 bp, Glycine max
  Clone ID: 701102714H1
gaacgggtaaaggcccctcttttttgcagcatcaacagaacaccaccaagcagatatggctacattgcaaacttatgcgttatcaaatcagctaggcgacagggaattgcaagtaacatgatgtcttttgctattgaagctgcaaaatctaatgcaggtttgacacaggtgtatgtgcatgtagacagaaataataggcctgcacagatattgtaccaaaagatgggctttgagatggttgaaatggcaaactcccggttggtagaagaaacatactt

SEQ ID NO: 23119 - DNA, 204 bp, Glycine max
  Clone ID: 701102638H1
ccgaaaccctaaccctaacggagagatggcggacacttggcatcgatattcgggacggagaaggacagggtgaactgtccgttctacttcaagatcggcgcgtgcaggcacggcgaccggtgctcccggcttcacaccaagccgacaattagcccaacattggttctgtcgaacatgtaccagaggcccgacatgaacatgagc

SEQ ID NO: 23120 - DNA, 207 bp, Glycine max
  Clone ID: 701102639H1
ggcttctggaatcgcatagtcacatcacattcgcagcagccaaaccaaaccacaccgaaacctccaaaaccctagcccgccaccgtccatcgcgacgacaccatccgctctgctcctcatgctcctcctcatccgttttcatcccttcttgctccgtcacgtacatgccccgtcccggcgacggcacccctcgcggcgtgacgctga

SEQ ID NO: 23121 - DNA, 206 bp, Glycine max
  Clone ID: 701102641H1
cgttctagatcgcgatctagaactctctctctctctctctctctctctctctctcatgaacgacgcacttcccatgtctcctcggttctatagatggagatggaagctctgaatctcgctttcgccgaatctcgtcttctgtgttcagatttcgctattctccgtttggattgatgaaaaaaaaagccttttctcttcccgttatt

SEQ ID NO: 23122 - DNA, 205 bp, Glycine max
  Clone ID: 701102642H1
gcaaatgtctatttgtggagattttggccgtgtttttgagattggtcctgtgtttagagcagaagattcctacactcacaggcatctgtgtgagtttacaggtcttgatgttgaaatggagattaagaagcattactttgaggttatggatatagtcgatagattgtttgtcgcaatgtttgacagtttgaaccagatttgtaag

SEQ ID NO: 23123 - DNA, 205 bp, Glycine max
  Clone ID: 701102643H1
gtggcttccagtttgctgtcaaacatcttgatggtaggcaactattgatcaaatcaaaccctggggaagtcatcaaaccaggtcaatataaagcaataaatgatgagggaatgccacaacacaataggccattcatgaagggtcgcctttacatccagtttaatgttgatttcccagactcagggtttctttcccctgaccaatg

SEQ ID NO: 23124 - DNA, 205 bp, Glycine max
  Clone ID: 701102644H1
caaaccccattgaaccctattagctatgcggctcatgaacccgttcctggtttggtctacgctcagagccttgttggggatgattcatcttctgggtattgcttggaccataattgggttgccagagaggctgttaggcaatttggtactgaccctactctttatgcaccttcacgattgtggcttcgtcaccattgcgatcatt

SEQ ID NO: 23125 - DNA, 208 bp, Glycine max
  Clone ID: 701102645H1
ctcacctccactttgcttgagggttatattctattctatataaggggaagctcaacttcttcctccttgtcgcatacatagatacatgggttcggcaccagaagtgttggcctcagagaagttgtggaaagctcattgggactcggttcctacagtacttgaatggaggtcctctctccttcaaaacccaccaagccatcgttctgat

SEQ ID NO: 23126 - DNA, 209 bp, Glycine max
  Clone ID: 701102646H1
caaatttcagattgacacagagactcatgacccccttgatattggaatgtaccagatccgggaggccaatcaaatggtggaggagtttatgcttgctgctaatgtttccgttgcacaacaaattcttaatagttttccattggtctcattattaaggcgtcatccaacaccaactagagagatgcttgaacccttgttacagactgctg

SEQ ID NO: 23127 - DNA, 213 bp, Glycine max
  Clone ID: 701102647H1
cggaatcagaggctccccctaacttctggggccacaccccggaagaagaatactacacctcccaaggcgttcgcaacaccaagtcccacttcgaaacccccaacggcaaaatcttcacccagtccatcctccctctcaacctccaaccccaccaagtcaaagccaccgtctttatgacccacggctacggctccgacaccggctggctcttcc

SEQ ID NO: 23128 - DNA, 208 bp, Glycine max
  Clone ID: 701102650H1
caaaatgttgcagcttctgtacgcggtgatatttgcggaaatgttcgtgatcgtcagctacctcttcaaaactccggcgaggaagctggtgatcgtcacattggatcggctcaagcgcggtcgcggccccgttgtcgtcaagaccgtcgccgccacgctgctggtggtgctcgcttcctccctctacagcatcgcaaaaatccggcat

SEQ ID NO: 23129 - DNA, 202 bp, Glycine max
  Clone ID: 701102651H1
gattgttgtgactcgttcttcttcgtcgttatcttcttcttttgttgtttgtgtgtttgttttttctctcacctgacaatgtcttgctgcggtcgtaactgtggttgcggaagcgcctgcaagtgcggctacggctgcggacgctgcaagatgtacccagacttgagctacaccgagtcaatcaccaccgagaccttggtca

SEQ ID NO: 23130 - DNA, 203 bp, Glycine max
  Clone ID: 701102653H1
ctcgaaccgcagaggaagcaatcaaggttaaggcctctgttatcatttgcttcacttcatctggaagagctgcaaggtttcattttatctccttctatgattcccctttattaaaaagacttcttattgctgggattgttgatgccagatttcgcatttgtcaaattctttctctcaataatttagttccatgttagatttac

SEQ ID NO: 23131 - DNA, 163 bp, Glycine max
  unsure at all n locations
  Clone ID: 701102654H1
caaggacaaagtttgatgttgcggaatgagaaaaagctaattatcatatacgtagaatcccgcggaaattcatgtatgttaggtaacatcaactttccacctgacagnacacataatgaaatgaaatcaaatgagaaaataatacacgtccaaaatgaagaaa

SEQ ID NO: 23132 - DNA, 85 bp, Glycine max
  Clone ID: 701102655H1
gctatcttgttggataatgatccggcgtatcggactcacaagccttgatccgtggagttgtcgacctggcatactcggggaatat

SEQ ID NO: 23133 - DNA, 204 bp, Glycine max
  Clone ID: 701102656H1
tgcaatcatcaataagtattcagagcaacctttcctaaaagaggatagtgtttatcacaggatggatgtgatcaataagtgcttctctaaaaaggctgttgaggaaatattatcttctctcgaggtggaagctacgagaaaggctgatccttggatttctgcaactattcaatccttaaagaaagcatctccaacaagccttaa

SEQ ID NO: 23134 - DNA, 204 bp, Glycine max
  Clone ID: 701102657H1
ccaatatcttgtacacgccccctttggtagttgccctttggaagttgccttatggtaaagaacacaatgaatccctgtcgtttataattttataatattttttgttctttaatattgggctgtagaactagtcgtcctgtccaaatacatgatgtagaaaatcgcctgtttagcatatgctgttgttaaattcccatcgttgtg

SEQ ID NO: 23135 - DNA, 208 bp, Glycine max
  Clone ID: 701102658H1
gttactttccaatttgaattgttccattttcatttctttcgcaaaagttgcaactagttcctcagaaaaaaagtttctaagttaaggaaatccagacacacaaaaatcgccggttctcgttcagctacatgcatagacatcctcctttctatcattcttcctcctcttggagtctttctcaaatatggctgccaggtggagttctgga

SEQ ID NO: 23136 - DNA, 206 bp, Glycine max
  Clone ID: 701102660H1
agcaaattaatcaaacatggctagggttagtgctttgtttcactctttgctcttgatttcttcccttgtattggcttctcaaatccatgtttcctctgggaaactagtccctggactatcatggaattactatttgttgacatgtcccaagcttgagaggattataaggcagcatcttgaggatgtcttcgagaaggacagtggag

SEQ ID NO: 23137 - DNA, 208 bp, Glycine max
  Clone ID: 701102661H1
aatttatatagcaagctagctaggttgaaaatagtttggttttgtagtaagtgaggtgaggtgccaaaatggtgaagataactcttggtactttcgatgactcttttggtgttgcctctcttaaggcttatttggcagagttccatgcaactctgattttcgtgttcgctggtgttggttcagccatcgcttacaacgagcttacaaa

SEQ ID NO: 23138 - DNA, 211 bp, Glycine max
  unsure at all n locations
  Clone ID: 701102662H1
ggcttccgaagaatcccagaacaagccccccagcgagcagtccactaccgaactcatcacgagcgcgaagtgcgtggcggaggcggcgcagtcggctctgaagagcgacagcgncaaagtggacaaggccaaggtggctgacgctgccggcgatcttctcgacgcggcggggaagtatggaaaacttgatgacaaacaaggcatagggcaa

SEQ ID NO: 23139 - DNA, 207 bp, Glycine max
  Clone ID: 701102665H1
gggttatttaagcctttctcgtgaaaaccgtcgcaagttgctccttgtccttgctagagagtatgatctcaataggtcacaagtgcgtgaactgataaagcagtaccttggacttgaacttcctgctgacaaagctcaagtgagtggctctgaagacgaaggcttgttctcttctttctatcgcgttgagaggaatttgaggcatgc

SEQ ID NO: 23140 - DNA, 202 bp, Glycine max
  Clone ID: 701102667H1
tctacactctattcaacccttcacattttctctcttctttatcttaaattacttttccatggaggaaagcaagaaacgagtccgggacgagtccagctactcacccgagtcccaaactcagctggtcgactctcccgagtctgaaagtcagcgggtcgactcacctgagtctaagattcgtcgagttgactcgtccgagtct

SEQ ID NO: 23141 - DNA, 200 bp, Glycine max
  Clone ID: 701102669H1
ctctcgagccgaatcggctcgagggctcgaggggaaaagtggcgagactcaactgcagtgcaattgctggttgtctggtcactcctgtgccgtttcctgcttcatctatgtcttgtggtattcctgctcctgtcaccgtggctgctgctgcaaaggggccctttgtgcctcctgaagatttattgagaagtaaaggggaa

SEQ ID NO: 23142 - DNA, 202 bp, Glycine max
  Clone ID: 701102637H1
aatttctattacatacattttgtagctaggatgagcaagttactactcattcgtgttgctgggttcgtggcaacctttgtcaccatggtgatgatgatggtgcccaaaaacgtgagtgcccaaaacataggtgatgacatcgtcacacaagacttcttcaacagcataatcagtcaggctgatgatggttgtgcagggaaga

SEQ ID NO: 23143 - DNA, 201 bp, Glycine max
  Clone ID: 701102670H1
cgaaatgattatcaattatcaatttgaaaattaaatatccactggaagcacggcaagaggaaaatggaagcatgcgtcgtttgggtggcttggcagggtatgggtgagtgagaaaagccgcgccgtcgcggcacggcaatagcaggtatagttctggttacgaacaccgtcatcgttggacaagcaaaagagaagtgcgag

SEQ ID NO: 23144 - DNA, 201 bp, Glycine max
  Clone ID: 701102671H1
gtttctagattttgactccacttcttccttccctatatgagcctataattcctaagcaaaatcatctcaaggtagagagacaaagatcacaagcatctaataatgatgaccagttatgtcaacctcaaaatatggcttcttaactttgttaccttgtttagtattctttctttgtcccatggaagaagagcaaatgcaaat

SEQ ID NO: 23145 - DNA, 202 bp, Glycine max
  Clone ID: 701102672H1
ctcgagccgctcgagccgattcggctcgagctctgcttccgacacacatcaatctttctgaccatatattactcttttgtctttttaatttattctccatacacatgcagacactaagttcgaacaagttcaggagcggcatggatttcttccaccgcgcgaaggcggtgcgcctccgcagccaccacgacaagtacctcct

SEQ ID NO: 23146 - DNA, 204 bp, Glycine max
  Clone ID: 701102673H1
ctgcgtttgcttctcctccacccatccacaaacgaacacacactttgattgagaatggggcgtgttcgcacaaagacagtgaagaagtcctcgcggcaagtgatcgagaggtactactctcgcatgacgctggacttccacacgaacaagaaggttctggaagaggtggccatcattccctccaagaggctccgcaacaagatc

SEQ ID NO: 23147 - DNA, 128 bp, Glycine max
  Clone ID: 701102596H1
tctgtctgtagctgtcggaagtttgaaacatacatattcttcttaattttgggtcagtagtatgtggaagttgaagatagcagaaggaggagatgggttaatctctgtgaacaatttcattggacgtc

SEQ ID NO: 23148 - DNA, 211 bp, Glycine max
  Clone ID: 701102601H1
cgagattgcaaaattctcttccgtttcaggattagcgtttcaccgttacagtgaaacatggcaaaaccaaagcgaatctctctgcgtatctttgcgctgctcctcttgatttccacctcttcgtttcagcttctccgcgcttccgatgacgccgatgatgatgcgatcttctatgattcgttcgacgaggattttgaagaccgttgggttg

SEQ ID NO: 23149 - DNA, 198 bp, Glycine max
  Clone ID: 701102602H1
actctcattccccattccctcagctacttcagcccctactcgattcggatgttccgcgatgaacgctcactcggaggtcacgacgacgtccagaacaatctcgggcgcgtcgctgagcgcaaacacgtctacgccgttatcgacggcgtgtcgtcgatttgtactcgtacggtttcatcgacatttccgcggcgtttg

SEQ ID NO: 23150 - DNA, 212 bp, Glycine max
  Clone ID: 701102603H1
ctttgcatctcataacagagagctgagaaaggaagaaaaaagcgtgtgtcagagatacttaacaatggttgtagaagatacccaaaagtcagtcatcacggaggaccaataccctagcagggtcgtcagcgacaacaacaacgacgacgacgacgatgatctcgaagagggtgagatccccgtcgacggcgaagatagcggcgccaccgcca

SEQ ID NO: 23151 - DNA, 208 bp, Glycine max
  Clone ID: 701102604H1
atgtgtacttcgcattagaagggacataacagaggatcaacgccaagcttttctcgtagttgctgctcttattgcaaccgcaacttatcaatcagcactaagtccccctggtggagtttttcaggctaatgctggaaacaacgataataataatgttaatatcacttcccccaattctacgactattgctacgcaaggacttaatgct

SEQ ID NO: 23152 - DNA, 206 bp, Glycine max
  Clone ID: 701102607H1
ccattttccatttcttctgtgtcttaaaaacctttctttcttgtcttcgtcttttctccctcttctctgcttcaccgcttgccaattcgctcttgacatggcctctcatacgctaaaaaatatcctcattattggagctgctggattcatcgcatctcatgttgcgaatcggcttatccggaattatccccagtacaaaattgttg

SEQ ID NO: 23153 - DNA, 204 bp, Glycine max
  Clone ID: 701102608H1
aaaaagatcacttttaaaattacagagactaaaagagaattaaaatataaattataagaattaaaaaggttatttttaaattatagaaactaaacaaataaaaattatgaaattatcagaattaaatgaataattttacatttttttttgggtagttttgaatttaccttgggatgtggatataagggaaaccgcgagagagaa

SEQ ID NO: 23154 - DNA, 210 bp, Glycine max
  Clone ID: 701102609H1
aatccctcatgagcctaacccaaatcgagctcaacaatctgtccgtggccaaggatgttggcaaggcttttgggcttctggctgggctggcctcagacaaattcccgacttgggccattctcctcattgggtccctccaaggccttatcggctatggcgtccagtggctcgtcgtcagccagagaatccaacccctcccatactggcaga

SEQ ID NO: 23155 - DNA, 207 bp, Glycine max
  Clone ID: 701102611H1
aaaaattacccaattgagactaccaggcttgaatttggcaggacaactgtcttcggcaattcagtctttatccgaactagatactttggatctttcttacaacacaggcttgacaggaacaattccacaagacattgggaatatgaaaaagctaaaatccctatcattggttggttgtggtttctctggtcctattccggattcaat

SEQ ID NO: 23156 - DNA, 210 bp, Glycine max
  Clone ID: 701102612H1
gaaaaaccaagtaatactagccaaaatatgtctcccaaatacatgtcccttttcctcctagtaatactagggatggcttttctggccactacttcccttgctgatcgtcgttttctttcggtggaagatggtcatgatcaccatcaccaccaccccccaaaaaaacactggcctccaaccacacaaaatgaaccttcaaacgtagaaaac

SEQ ID NO: 23157 - DNA, 208 bp, Glycine max
  Clone ID: 701102613H1
ctctctttgaaaactgtcacgctttcaccggcgtcggaaacatcgtccggttagggttccggctatcgctaagggcacggatcataaaatcttccagaagcttctatgctattactcagtattattaccatttgccaaggtgttgttaggcaccatttttatcacttgaagtcagtcagcaacatattttctgcgaatttttcaggaa

SEQ ID NO: 23158 - DNA, 213 bp, Glycine max
  Clone ID: 701102614H1
ctgctagctgtgacttgttttgagttcaatcaaatcgcattggtctctgaaatcaggaaagatggttagcgtagtgacgatcaggcaggcacaaagggcagaaggcccagcaaccatccttgccattggaactgcaaacccaccaaaccgtgttgatcagagcacctatcctgattactacttcagaatcaccaacagtgaccacatgaccga

SEQ ID NO: 23159 - DNA, 215 bp, Glycine max
  Clone ID: 701102616H1
tctgcactcagggctgtgattaaatgcattgaagaatacaaacttgaggatgagttccctccagaaaatctgaagaagcgacttgaccagttagagaaggtgaagaccgagaaaaggaaaccagtggcagttcctgccaataagagaactagagcaagcaacggcaatggaggtccaatgccaccagccaaagctgggcgtttgactaatgcgta

SEQ ID NO: 23160 - DNA, 210 bp, Glycine max
  Clone ID: 701102618H1
gaaggaaggaacaaagcctgcgggaatgatctaacaattcctcttttggtgaacaaaattctcagagtttcaccactgaccacagactattctgtttctgccatttggaagctgtgcaagtttggagaaaaagatgaagggagaacccttgttgaggcccttcaagttggtgcctttcagaagctcttgttggtgttgcaagttggatgt

SEQ ID NO: 23161 - DNA, 209 bp, Glycine max
  Clone ID: 701102619H1
gagagagagagagagagagagagagagatatggcttgcaggcaattgtgggcttcaagagctgtctcttacctgaggctctctgtgtttcacagaggcttttctaatgttgttaaagatttgaagtatgctgattctcatgagtgggctgaagttgatgaaaattctgcaaccgtcggcataactgatcatgcccaagatcatttaggt

SEQ ID NO: 23162 - DNA, 209 bp, Glycine max
  Clone ID: 701102620H1
gtgatttggagtttggagcgactgaactaatcattaatttgcactcgctgtttcagcttcatcacccttcttttgcatcatttatatctcttgagaaatggcacaagaaacctttctattcacatctgaatctgtaaacgacggtcaccccgacatgctgtgcgaccagatctctgatgcagtacttgatgcgtgccttgaacaggacc

SEQ ID NO: 23163 - DNA, 208 bp, Glycine max
  Clone ID: 701102621H1
ccaccacacaattcctacacatttctactctttagtttctccaattttctttctcaattctcaacaatggccactacaacacaacttcacttaccccctggattcagattccatccaacagatgaactactcgtcatccactacctttgtcgcaaatgcgcttcgcaacatatcgcggttcccataatcgccgaaattgatctgtaca

SEQ ID NO: 23164 - DNA, 143 bp, Glycine max
  Clone ID: 701102623H1
ctcaaagatataataatatatagatatagctgatgagagagacagtgtttgtggataattggtcattgtagccatatcaaagaaagacagcataatctattattcttgtcttgtgctttcatgtgtaacaaattgcgcgttac

SEQ ID NO: 23165 - DNA, 210 bp, Glycine max
  Clone ID: 701102624H1
caacaacaagcctctttttggatcaattctggtggcaaaagatgagacatcatcaggtgacaataatggagctttgaagaaaccaattgattacacacttgtgtggagcagcaagtcccaaaagatcaagcaagacaaagatggctatatttggctaccaacagcacctgatggctacaaaaccttaggccatgttgtcaccaccacacc

SEQ ID NO: 23166 - DNA, 208 bp, Glycine max
  Clone ID: 701102625H1
gtagaggctgctgtgaagagctataaacaagcattgattcttcgtccagacttccctgaagcaacttgcaatctccttcatacataccagtgtgtatgctgttgggaggatcgtgataaaatgttcaaggaagttgaagcgataatcaggaggcagattaatatgtccgttattcctagtgtccagccattccatgcaatagcatatc

SEQ ID NO: 23167 - DNA, 210 bp, Glycine max
  Clone ID: 701102626H1
ctcgagccgtgaaaaggaggagccagataagccagacaagccagaaaagcaatagtgtgtcgtaaatgactggtcttgattccctccagttatccttgatatgccgagccagactgctgattgctaaagtgaatgtaagggtatcacatgaatacctatagcataaaattttttagctttcttcaagttttttctagccgctaatgtgcc

SEQ ID NO: 23168 - DNA, 209 bp, Glycine max
  Clone ID: 701102627H1
ctggatttgttgtgaagatcttgcagtacatagtgccattgctgctattggcctttgcatttggcctgcagtactatggcaaaaaaagcaagtcagaaaattgaacttgagttgtgaccattgttttagtacttctattattcataagtctctaacaacagtgtcctagtggcaatagactggtgccattgttgtttcttttctttttg

SEQ ID NO: 23169 - DNA, 211 bp, Glycine max
  Clone ID: 701102628H1
ctaaaactaaaactaaaaccccactcagtcttccagtgaaaaaagaaaggcagcgatggaagaagacttcgacatccccggcggcgaggaaatggatctcggcgaagacaaggtcggcgaggcgcgggagatcggctcccgcggcctcaagaagaagctcctcaaagaaggtcaaggctgggaaacccccgaagtcggcgacgaagtccaa

SEQ ID NO: 23170 - DNA, 210 bp, Glycine max
  Clone ID: 701102629H1
ggcgatgatgcaaggtgtgcagaagaacacgctatacgtgggaggcttagcggaagaagtgaacgagttgatcctccacgcggcgttcattcccttcggcgacatcaaggacgtgaagacgccgctggaccaggcctcgcagaagcaccgctccttcggcttcgtcaccttcctcgaacgggaagatgcctccgccgccatggacaacat

SEQ ID NO: 23171 - DNA, 212 bp, Glycine max
  Clone ID: 701102630H1
ctccaccgggttacgcttatcctttggcgaccaacaacaacaaagacagcaattacaacatcatcaacaacagcatgggtgtcactcctctcctttcatatctctattatccgaagaaggcttgtcttctcaaatcaaacaacagcgtgacgaaatagaccaattccttcaagcccatggggagcaattgcggcggacattagcggagaaga

SEQ ID NO: 23172 - DNA, 216 bp, Glycine max
  Clone ID: 701102631H1
ggctctcctccacaagctcgcacctttcacctctctctacaccaataccccccattccccaccaccccgccgccacgtcatcatctccttctccgtctcacccttcaccgagaagcactccacagagcgctaccagagggaccaatgggtctaccagagcaccactcaagagggtcaacctcaaacgacgccgtttcctcctctcccgtgcgattc

SEQ ID NO: 23173 - DNA, 218 bp, Glycine max
  Clone ID: 701102632H1
cggtgattgtttgttgttgtaactcgttcttcttcttttgttgttctgtgtttgtgcttgttttttctctcacctgaaaatgtcttgctgcggtggtaactgtggttgcggaagctcctgcaagtgcggcaacggctgcggaggctgcaagatgtacccagacttgagctacactgagtcaaccaccaccgagaccttggtcatgggagtggcacctg

SEQ ID NO: 23174 - DNA, 215 bp, Glycine max
  Clone ID: 701102633H1
gaaccaagaacgtaacggttaacagcaactactttgtttcacatggacgagagaccaagaatagatccaaggcgcggtttcaaccgcgcttccagaatcttccacagcctcaagccaccactccccctccctcctcccaacgccaccttctccgccacaacctacgccctctccctccgccgcaactcgctatttcccgactccaccaccgccct

SEQ ID NO: 23175 - DNA, 196 bp, Glycine max
  unsure at all n locations
  Clone ID: 701102634H1
gtagtaagtcggaatgggtcgagtcgagtgctcgagcggctggtagggctcgagttgaggtgtgtcgcttacagtttcttagtgccgagggataacagatacacgcattactgncatgggtaaaggttgtgtcaactaaagcagatgtttctgcgcagatgctgctttgtagtcgacaatggtttggtagcattta

SEQ ID NO: 23176 - DNA, 161 bp, Glycine max
  Clone ID: 701102595H1
gaaagctcgacatgtcagggaaaggcgcaaagggtttgataactgctaaggacaaagataagaaaaaaccaatttctcgctcctcaagagccggtcttcagtttcctgttggacgcattcatcgtcttctgaagtcaagggtgacagcacatggaagagtt

SEQ ID NO: 23177 - DNA, 205 bp, Glycine max
  Clone ID: 701102635H1
ctcgagccgctcgagccgattcggctcgagcgtccactgcttggcttgatgttggagaagcctcagaaactgctcctgatgatctagaaggtttacctgcttctgctgcacatgttgcaaatttgctgtctacagaacctgcagacattaagcttggtgttggagggttcagtatgggagcagctactgccctgtactccgtgtc

SEQ ID NO: 23178 - DNA, 174 bp, Glycine max
  Clone ID: 701102534H1
ctctacagtgcaattgatggcagcaaagggttctataaatgccctgttgagaagtctgtgagatctttgatgaatgtgcctttcactttggagaaatcagagctggagggtgagtttatcaaggaggctgctaaagagaagatggtgcagctcaagggacatagatcagtggga

SEQ ID NO: 23179 - DNA, 172 bp, Glycine max
  Clone ID: 701102537H1
cggctcgaggttgtaggctaggtcctattgttagtgaaggacagtataaaaaagtgttgaattgtatctcaactgctaagagtgagggtgcaacaattttgattggagggtctcgcccagagcatttgaaaaaggggtactttgttgaaccaaccatcataactgatgtgac

SEQ ID NO: 23180 - DNA, 172 bp, Glycine max
  Clone ID: 701102538H1
acttgatctgcctttgctttgttatttcattaacagcacccctttgggccatatattggttacctcaactgcttttctgttcatctttccagaattattgtaaagttccctttttttgttctgtcttttcattcttttttcaaagtgaattcctgggattttttgttttcaa

SEQ ID NO: 23181 - DNA, 170 bp, Glycine max
  Clone ID: 701102539H1
cttccgatcatgaccatgatcatgatcatgttaacattcccgtcattgacctgaaacatgttttctcggaggatccgatcctccgagaacaagtgtttgggcaggtggaccaggcatgtcgggagtgggggttcttccaggtggtgaaccatggtgttagccatgagttg

SEQ ID NO: 23182 - DNA, 166 bp, Glycine max
  Clone ID: 701102544H1
ctaggttaaaaaagctacagatttctttttgctgattttggaaaattttcgtgtgattagcatcttgcagtagtgattgctggtcctcgtatcaatgtacacagactactgccatctctagatttcaggtgcagggtttttgattctatgtgcttctacaattttc

SEQ ID NO: 23183 - DNA, 167 bp, Glycine max
  Clone ID: 701102545H1
gtgatccgtgcgcagcgtaagggagcaggctcggtcttcaagtcccacacgcaccaccgcaagggccctgcccgcttccggagcctggatttcggagagcgcaacggctacctgaagggtgtcgtcactgacgtcatccacgatcctggccgtggcgcgcctctcgc

SEQ ID NO: 23184 - DNA, 168 bp, Glycine max
  Clone ID: 701102547H1
gtaccttggagaagaaactttgtatagcaaaaatgataaaaaccaatagctcccaagattggcctgagccaataatccgtgttcagtccttatccgaaaggtgcacagattcaatccctgagaggtatatcaaacccctcagtgagcgtccatctgatgatgttgttg

SEQ ID NO: 23185 - DNA, 172 bp, Glycine max
  Clone ID: 701102549H1
tttacatttcagcgcgcatcactttctctctccgaaatgaagcagtctcttctgctgagacgcgaaagcagtgaccagagttaccagtcgcggggaatattccggcgctccgatgctatcgcctacggctccaactacgagaaagccgctgcgttcatcgatctggctgaag

SEQ ID NO: 23186 - DNA, 168 bp, Glycine max
  Clone ID: 701102552H1
ggaaaaaataatggctgaagctactgctgcttattctcttcccatatcattaagtcatcagtttacttctcgcaatgatcctccaacattctccatggatgactttgaagctcttggaaattcaaccatatcatcaagtcctcccttagctggggagagaaaatcgtt

SEQ ID NO: 23187 - DNA, 134 bp, Glycine max
  Clone ID: 701102553H1
tggcagaggtgcatcaccggaagaagacgcaggcaggtggcgcagtacgtggagagaggacgctatataaatagatgttgtccccgatgctctcgatgtcaggcactcgtatatgcttcctccgcacaacatac

SEQ ID NO: 23188 - DNA, 168 bp, Glycine max
  Clone ID: 701102554H1
cattaagagcgtagaaaccattgaaggagatggagggccaggaaccattaagaagcttactcttgctgaaggtttaggttatgtgaagcaccacgtagatgcaattgacacagaaaactatgtgtacaactatagtgtgattgaaggcagtgcattgtcggagccatt

SEQ ID NO: 23189 - DNA, 168 bp, Glycine max
  Clone ID: 701102556H1
cttgtatgctttagtttctagcatcgatcactcctaattacttgctgcatttctctactccttgtgcttgacacttttgtcatttaaaatggaacttaattttaagtaccaacttagccttttctgtgtcacactgctcttacctgccctgtgtacctctcaagactc

SEQ ID NO: 23190 - DNA, 163 bp, Glycine max
  Clone ID: 701102557H1
atcactggtttcacacttgcgactttcagtactcctattatcagtttcattgggaaattcagcttcactccaagaaaattttgtccaatgtctcaacttgaattcggacagaacattcccatttaacccactaatttacacaccaaaaagtccttcattcacc

SEQ ID NO: 23191 - DNA, 163 bp, Glycine max
  Clone ID: 701102560H1
atactttgatattcaatgcatttgttctctgtcaaatctttaatgaatttaatgctcgaaagccagatgaattcaacatattcaaaggagtcacaagaaactacctctttatgggtatcattggattaactgttgtgcttcagattgtcatcattttatttct

SEQ ID NO: 23192 - DNA, 163 bp, Glycine max
  Clone ID: 701102561H1
tgctgtttgttttcccaggttttagagctccaaaccttcagatccacctcattcgtctccagatcttccttcctggataacgttttcgggttcgagaaggcacttgtgttgtttttcgtacgaaatggagactaaacagagttcggtgacggttacgctcagt

SEQ ID NO: 23193 - DNA, 162 bp, Glycine max
  Clone ID: 701102562H1
gcaaaacctcaactgtgttggatgtccaaatattaggaaggttgtcattccattgagggcaaattgttttcatttgttatttttaaacctttcactctcggcaaatttgaaagaggttgatgttacttgtctcaacctatgctttcttaatttaagcaattg

SEQ ID NO: 23194 - DNA, 166 bp, Glycine max
  Clone ID: 701102563H1
cgcaagcctctcattgtaatgtcccctaagaacctgcttcgtagcaaggcttgcagatcaaatttatctgagtttgatgatgtccaaggccacccaggctttgacaaacagggaaccagattcaagcgcctcataaaagatcaaaatgagcacaaagatgttgagg

SEQ ID NO: 23195 - DNA, 170 bp, Glycine max
  Clone ID: 701102565H1
gtgactggcaatctaagcaattgtgtgatgtcaaaacgtgatgtttgtgaagatggctaagctttgagcatctttggaatagtttactgctttctggtcacgtaagcacctgtttttagaatatacttggtagcattggttgtatgcaaaaagagttacaataaatggag

SEQ ID NO: 23196 - DNA, 169 bp, Glycine max
  Clone ID: 701102566H1
cacaaggactctagagctacaaatcctagcccaaattccaaaaccgaattcggttccattaaggtcgaacaggagattcaacgaatggggaaccatggcagcagcagcagcaacaacaacaataacaaaggtgttggaaggcatttcgttggtagtggtgggcaatgga

SEQ ID NO: 23197 - DNA, 167 bp, Glycine max
  Clone ID: 701102567H1
gtgcgagctgaattcaactcaagtatcaatgctaatactgttcttgtgcagaaccctctgccatcatttacatctcgtgttacttttgagttagaacctggagcagttggacacaccactgattttaaggaagcaaataaaagactggaatggggtctgaaaaaggt

SEQ ID NO: 23198 - DNA, 167 bp, Glycine max
  Clone ID: 701102568H1
ctcgagccgaccactaccacctttccgccttcagccgtttcaaccaccagcaaatggctgggcttcgtggcggccgtgtggattcaatgcatctccggcaacaactacactttctcaaactactccgacgccctcaaatccctcatgcacctcactcagctccaact

SEQ ID NO: 23199 - DNA, 165 bp, Glycine max
  Clone ID: 701102569H1
ctccctttaattgcatatatctgagaatcactcttttattgattcaaactttggaaatctcaatcttcacccttatgattgaaattaacatgaagcatcaaggcaagcttagagtgtttcttccaaatatgataatacttgtaaccatccttctccattcaacaa

SEQ ID NO: 23200 - DNA, 162 bp, Glycine max
  Clone ID: 701102571H1
gaacgaacggatccgaaaggcgctgagagaattttttgacctgacgggggcgttcaatgtgtctgatgctcttccttatttgagatggttggatttggatggtgcagagaagaaaatgaaaaagacggcgaaagagttagatgggtttgttcaagtttggct

SEQ ID NO: 23201 - DNA, 166 bp, Glycine max
  Clone ID: 701102572H1
atactactaactgtgttgtaatacctcagtggagaacaagatgaatccatggaacatgagaacttccaagttactctctcaacaacttgcttatcctccttatcgcttggtagaagagattccaaacatggtaaattccagttgtgtgagcaaggagccaagaggt

SEQ ID NO: 23202 - DNA, 163 bp, Glycine max
  Clone ID: 701102573H1
gtacacctccccagcttccatttaaggtatatatagcttataagtgaacttcatatacatcttctttatattaattttcgctcttgtttcttttttcccccatctgtagtttgtggggctagaagtttctatttctgggcattcagaagattgcaggaaaagt

SEQ ID NO: 23203 - DNA, 160 bp, Glycine max
  Clone ID: 701102574H1
gttgagaggaggcactgtggcagaagtcctaggagtgtaaaacagagacgcaaaatgaagacgatcttgtcgtctgagaccatgaatattcccgacggcgtgagcatcaaggttcacgctaaggttatcgaggttgagggccctcgtggaaaactcgtgc

SEQ ID NO: 23204 - DNA, 154 bp, Glycine max
  Clone ID: 701102579H1
agttgctagatcttcttcacgttgccaatgcggtgggtagttaattagtagatatgggtttgagatttgagaacaattatgtgttactagagctagagtctccaatccttttattattattattattattattttcttttatctcattcccgtt

SEQ ID NO: 23205 - DNA, 165 bp, Glycine max
  Clone ID: 701102580H1
ctcgagccgaaacgcagcagcagctgcaggccacggcggcaccattctcgacctccactcctactcctcctcctccttcctccggcggctccgcgtccgaggcaccgccgaagcaggtggctcaagcaatggacaagctcggacaagccgaacgaatcatcgccg

SEQ ID NO: 23206 - DNA, 174 bp, Glycine max
  Clone ID: 701102532H1
ctcgagccgttttgctccatctctgtatatcatcacaacttccaaaggcttacttactctaatatatctctgattcaagtggttctgtgagttttcttgttttagtctgaggctttgagttttgtttaatagatatgccaagggcaaattgcagtttctgatttgttgaaactg

SEQ ID NO: 23207 - DNA, 163 bp, Glycine max
  Clone ID: 701102582H1
caatcacaattgaatttctgggattctcacctccatcaacaaaccctaagcacataacatcgtcgctcacctgcaccatagagtttcttccgtatatgctccacttcaccatctcgctctgcagcaccagatcaatgatcggcacgttgggccccacttggga

SEQ ID NO: 23208 - DNA, 162 bp, Glycine max
  Clone ID: 701102583H1
gtgaagttgcagtcaattgtgatgccgctttctgagtttgatcatgcagataagggagatgcgctgcacgcaatggaactcgctctctcattagagaagctaacgaacgaaaagctccttaacttgcacagtgttgccacaaaaaatggtgacgtgcagttg

SEQ ID NO: 23209 - DNA, 159 bp, Glycine max
  Clone ID: 701102584H1
ccaaagtggggcataaaatggataggcctacaaatgcttagtgttgcatgctttgtaattactagattagctgcagcaggttccattgctggggttattgatgatctttaagtttacaagccatttgttaccagctactaattcaataggataattact

SEQ ID NO: 23210 - DNA, 165 bp, Glycine max
  Clone ID: 701102585H1
cctcgagccgattcggctcgagctcagtggcggtggctatgtcaaacacagaactaagatcccgctggcggttggcgcaacctaccgatcttcatccaacggggcaacgttggatctgctgaactgaacttctttttatatgcactctgtgatttcactctgctt

SEQ ID NO: 23211 - DNA, 163 bp, Glycine max
  Clone ID: 701102587H1
tttttaaattaagtataatatattatcagatatcgagagagagataggattcatcgtattgttatcatcccttgcaatccatgtttctgtttctaccaccaaagcatgaagttctgcaagacctaccagcagtacatgcaaggacatggccacaacaagctcc

SEQ ID NO: 23212 - DNA, 156 bp, Glycine max
  Clone ID: 701102590H1
ggtgaaagtatgatggataaagaagagattgttagcagtgaaagtgagcaggaagaggaggacgaggatgaggaggatgcagggaagaacagaaagcctgatgccaaaagcaagggttggttttcatccatgttccagagtattgcagggaaggca

SEQ ID NO: 23213 - DNA, 158 bp, Glycine max
  Clone ID: 701102593H1
aagaaattcgccatgggttatgatgaacttatgcctctcagccagcatggaattgatggattaggtgggttgggggctacagtggtggatgctctcgatacggctatgatcatgggtcttgatgaggttgtggctgaagctggatcctgggttgaaga

SEQ ID NO: 23214 - DNA, 160 bp, Glycine max
  Clone ID: 701102594H1
cacaatttcaacgccacaccaaaaattccactgcaccaccaccctccccatttgtacttttcttctcattctctttccactcccctgcattctgcacacaatctagctttacgtgcttctgggcaaccgcataaggttaaactgttaagcatatcattga

SEQ ID NO: 23215 - DNA, 261 bp, Glycine max
  Clone ID: 701102487H1
attcttcttctcatttcaactctttgcaattgcgatctttcattccttgttttttactcttggtaagcgcagttcggtgttggagaaccagcttccagttccagaatactgctgaacagagttcggcttcgcttattgggactcagttgtgtttctactaggttatcttctctgaattgcaaatgaatgatcgttgaaaaaccatgaagaaggtgaggagaaagatcggcaagtatgaggtgggtcggactattggcgaag

SEQ ID NO: 23216 - DNA, 264 bp, Glycine max
  Clone ID: 701102488H1
cttcaaacataacttctttgtgaaccaaattgatattatggcagaccctcagaaaattcaccctgtgcaccatgatgttgaggcacaaaaccacccttcagcaccattggtgccaaggagcatgtccaaatctgatcaggtgatccacaacgagtagtagtacaacaacaacaacaaaacattcctctgaagcaaaccaagccaccaccgaagaaaagaagaagctgctgctgcaggttcttctgttggctaataagcatattg

SEQ ID NO: 23217 - DNA, 261 bp, Glycine max
  Clone ID: 701102489H1
gtgaagtttgtttattctgagaaggaagagagaatagaacgccatggatgagatattgcacaaggtggggtcttactggttctccaagaaggccagcaaggaatttaactctgtcggcgatgatatcaactcacttcaaccagtattgaagggggaaccaaatggttggtcaacaagttaaaaggaaagatgcaaaaggcattaacagagttgctaaaggagtatgatctacccataggaatctttcctcgcgatgcgaca

SEQ ID NO: 23218 - DNA, 260 bp, Glycine max
  Clone ID: 701102490H1
gcagcagtgcagggaagttggtgtgtgtcaccggtgctgccggttatattgcttcatggattgtcaagttcctacttgaacgtggttacactgtcagggccactgttcgaaacccaaatgatcacacgaaggtaaacatttgctaaaacttgaaggtgcaaaggagagactgcacctttttaaggcagatcttttgggtgaaaattcttttgactccattgttgagggctgtgatggcgtctttcatactgcttctcctt

SEQ ID NO: 23219 - DNA, 241 bp, Glycine max
  Clone ID: 701102491H1
tcgagcctctaacctacctctttttcttctctctcaacaacttcaccttcttcctcctcgatcatgtctcacttcaagggcaagtaccatgatgagcttatcgccaatgctgcgtacattggcactcctgaaagggtattcttgctgctgatgagtcaacagggacaattggcaagcgtttggccagcatcagtgtagagaacattgaatccaacaggcgagctcttagggagctgctttt

SEQ ID NO: 23220 - DNA, 260 bp, Glycine max
  Clone ID: 701102492H1
gtggaacaattggacatatagcaccagaatacctctcaactggaaagtcttcagagaagactgatgtttttggatatggtgtgatgcttcttgaactaataactggacaaagggcttttgatctagctcgacttccaatgatgatgatgtcatgttgcttgattgggttaaaggacttctcaaagacaggaaattggaaacactagtagatgcagatttacatggtaactacaatgatgaggaggtagagcagttaatcc

SEQ ID NO: 23221 - DNA, 235 bp, Glycine max
  Clone ID: 701102493H1
attctaatcatctgggttttgctggatcagtaaattcaggaattacaacctttgagatggagtatggacactgggtgaatgagcaaaatagacaaatcacagaactgagaaatgctttaaatgctcatattggtgagtagagctcaggatgttagtagatggtatgatgagccactaatgccgaaatgtttcgcatgaactctgctgctgcaaaagcagatgttttctatgttat

SEQ ID NO: 23222 - DNA, 265 bp, Glycine max
  Clone ID: 701102495H1
acatctgcagagcctgcttggttttaccgtcatgttacatgccaaacctctgcctacatagttggtgttgctgggtggggaactggtctcaaactcggaagtgactcggttggtattaagtataacacccatagagcattgggatcaccctcttctgacttggacaccttcaggtttttgctctgctcttgaggcccaacaaagaccaaaaatcagaatctactggaacatttaccataagccgttggatatcccacataatcat

SEQ ID NO: 23223 - DNA, 269 bp, Glycine max
  Clone ID: 701102496H1
cacaaacatttactaagatcaatccacacactccatcatcatgcatcaagcaattccctatagatcatggcgccctctccataaccccaccacccacttctccccattgccattaattgcacattcccacaacgatgatgataaatgaggaacattgttaacaataataataataatattcattcttcagcagggagaatggtgctcaacatggtttctgagaacgcggttatagtgattgggagaagaggctgttgcatgagccatgt

SEQ ID NO: 23224 - DNA, 192 bp, Glycine max
  Clone ID: 701102502H1
tcggctcgagtctctctctctgtctcctacgattcgttttgccccttgtgttgccctaatttcaaccatgcctcgccgtagctccggtggaagatctgcccgttctgctcctcgggcagctcctcgtcctgctccagttcaccatgctcctcctccagcccctgctcagagtggtggtggatctatgcttgg

SEQ ID NO: 23225 - DNA, 182 bp, Glycine max
  Clone ID: 701102503H1
ccgagttcatccatccaacggtccttcctctcctgtgatgaagccctcatcttttgggtttgactcatcagctgctgtggcaactgcaatgatgaattccaggtccgccgcgtttgcaaagcgaagccaaagtttcatcgatcgtggagctgctgcaacccaccaccatcttggggggatgt

SEQ ID NO: 23226 - DNA, 180 bp, Glycine max
  Clone ID: 701102504H1
gcaattgcaataaaccaacgtttaatagtggctgtctcgtttgcttggtcttatgtgtctctcatagttgtcgctcttttgctttctcgtattgttctctcatagtgtctctcttgttcttcaatcaagagaagatagaatacaccctgaagccatggaaggtggtgtgctagaagctga

SEQ ID NO: 23227 - DNA, 174 bp, Glycine max
  Clone ID: 701102505H1
ctggtccttgatgatgatgggaatctcaggatctatagcttctaccctgaacagaaaaaccaatgggttgaggtttggaaagggatatgggagatgtgcagaatcaaaggcaaatgtgggcctaatgcaatttgtgtgcccaaagaggatttgagcacttccacttatggggtt

SEQ ID NO: 23228 - DNA, 180 bp, Glycine max
  Clone ID: 701102506H1
ggtaaatgggacctacccgcccgaagttgaagcctttcgccagaagattctcgcagctgatagcatcctctttgcctcccctgagtacaattactctgtcgcaagtccattaaagaatgcacttgactgggcatcaagggcaccaaatctttggtctgctaagcccgctgccatagtgag

SEQ ID NO: 23229 - DNA, 177 bp, Glycine max
  Clone ID: 701102508H1
ctcgagccgttcattttgttgttcgaagccaaaaccctagcagccggcgagaatggcagacgttgaggttgatgcggcggcagccgcaggggcagcgcaccgaagaagagaacgttcaagaaattcagcttcaggggcgtggatctggacgcgcttctggacatgtccaccgacgaa

SEQ ID NO: 23230 - DNA, 177 bp, Glycine max
  Clone ID: 701102509H1
tgaacactgaatgatttgtatggtgaaggaggttcaaggaagaaacaacagctcacttacttcctttaaattgtggaatgctacttttatttttggatttgtgaccattcatcctcaatgatacatacctttaacaaaggaaggattccttcatcagagatgttgaactcaaagcat

SEQ ID NO: 23231 - DNA, 175 bp, Glycine max
  Clone ID: 701102512H1
gttggtggggatgatcctcctcttccaagttacccccaagcagagattgagaatggtggcacacacaaaacaagtgaacacagttcaagcagctcctagtagtgaatctggctcttcatccagtgattcagatagtgagtcagatagtgaaccaggcattgctaaagcatcagac

SEQ ID NO: 23232 - DNA, 174 bp, Glycine max
  Clone ID: 701102513H1
attgcgtacagttatccagaaacaaaaaccgtagagaatccgaatcccttatcaagcaggggtttcgcggcccgagaccaagtcaaaccgagacggtgacactggctgagtggaatttccgccgccattcgaagctacagcgatggccatagccgccaccatttccgttcctct

SEQ ID NO: 23233 - DNA, 175 bp, Glycine max
  Clone ID: 701102514H1
tttcaatttccctaggggcttaatatctccccgcatttgtgcctagcctcattattatcatagtagatattcattccccttatctttctctcttctctctccccgcccaaaccctaactccctaccctattccgctttctctcatccatcatgaaaggaggaaagtccaagaccg

SEQ ID NO: 23234 - DNA, 173 bp, Glycine max
  Clone ID: 701102515H1
cgggttgattgacccagaaggaatcgaaacactttgtgctgatatggaggtggatcatacagatgtgagggttttgatgcttgcatggaaaatgaaagctgaggagcaaggatattttaccttggatgagtggaggagaggcttaaaagcattaagggccgatacagtaagta

SEQ ID NO: 23235 - DNA, 178 bp, Glycine max
  Clone ID: 701102516H1
gtttggaggatccagggatctcttgctgtgtctaggggaattggagatagacacctgaaacaatgggtgacagcagagcctgagaccaaagttctcagaattgaacctgaacatgacttgttaatcttagcttcagatggattatgggataaggttagtaatcaggaagcagtagata

SEQ ID NO: 23236 - DNA, 178 bp, Glycine max
  Clone ID: 701102518H1
gtcgcgttgtgttgcgtcgtgtcgtgcgctgttcctctgtctgtcgtttttgttttcagaccaaaccctagctccgcatcgcaaccatgtcgaccaagcaaggtggaaaagctaagcctttgaagaaacccaagtctgataagaaggattacgacgaggttgacatggctaacattca

SEQ ID NO: 23237 - DNA, 177 bp, Glycine max
  Clone ID: 701102519H1
ctcgagccgctttgagaagtccaatgtggtatctccatttgcaatgcatcaacagcagctggccatgctggcacagcaacagtctcttctaatggctgccgctaaatctgctggtggggatcccaagtacctggccagcttacaacaacaacagtctcttctaatggctgctgctgc

SEQ ID NO: 23238 - DNA, 176 bp, Glycine max
  Clone ID: 701102520H1
gaagaagagaaagaagcatgaaagcacagatagcctggtcagcatgcatgatgtcatggatgctcagtgggtttatgataattatagggatgagacttatttgaggagggttgttatgcccttggagattctcttgactagctataagaggcttgttgttaaggactctgctgtca

SEQ ID NO: 23239 - DNA, 52 bp, Glycine max
  Clone ID: 701102521H1
gcggactttgaatgtgattgttgtctttttaaatgaattaatgtatatatat

SEQ ID NO: 23240 - DNA, 175 bp, Glycine max
  Clone ID: 701102522H1
gaaagaagtggagtccaacactattgatatgatgatagaagaggacttctctagagagcaatgcaggtggaagaaaaatgctgagcacacaagtgagctagctgtggaacttgaacttgctatcttttgctttctagtggaggagctttcagaggaactagtgtgttaatgtggg

SEQ ID NO: 23241 - DNA, 175 bp, Glycine max
  Clone ID: 701102524H1
ctgagaaagagatggcaattgggttcatggaggtgcagcttgtgaaagcaaaggagttgtgtgacactgatttctttggtagtatggacccgtatgttgtgatacaatacaacggccaagagcaaaggagtagtgttgctaagggacagggcaataatccggtatggaatgagaa

SEQ ID NO: 23242 - DNA, 169 bp, Glycine max
  Clone ID: 701102526H1
cttcgcctttctctctcttctttttactctctctctgtctctctctacgctttctcgttcgagatccctcaagggatccactaactgaaggagaaatggggttgacattcaccaagcttttcagccggcttttcgccaagaaggaaatgcgaattctgatggtgggtct

SEQ ID NO: 23243 - DNA, 169 bp, Glycine max
  Clone ID: 701102527H1
cccttctttcataaatatgcgtctctgcgacatgttcaccaccacctccttgttcacatcatcatcatcatcatcatcatcatcttcttcttcttcaatcagttgactcttcgttcctccctctattcatctgatggagcccatggacatcgttgggaaggccaaggaa

SEQ ID NO: 23244 - DNA, 257 bp, Glycine max
  Clone ID: 701102485H1
gtttttgccctgctccttttaggcagttccttgagattgtagtgaacatgaagtttgatgaagaacctaactattccaggctaatatctttgcttgatggtatgcttggaccgaatcctgcattgaggccaataacactgaaggtgctcaaaaggtcgggcagaagaggggtagattgaatattgaggaagaggatgattcacagcccataaagaaggttcgtttgggggttcctgctacacaatggatttcagttt

SEQ ID NO: 23245 - DNA, 169 bp, Glycine max
  Clone ID: 701102528H1
gggatttgttataataccatcaaacagaagtacaaaagcgatgtgcagctgattccattgtgaagaagagagcagaaagaaataagctttataataatgtatcccaaccaagccttttcttcaggttcttatgcggagatgatgtctgggacttctctgttacctcatg

SEQ ID NO: 23246 - DNA, 166 bp, Glycine max
  Clone ID: 701102531H1
ggacttttgatgtctctcttctcaccatcgaggagggtattttcgaggtgaaggccactgctggtgatactcacttgggaggtgaagattttgataacagaatggtgaaccattttgttcaggaattcaagaggaagaacaagaaggatattagtggaaatgccag

SEQ ID NO: 23247 - DNA, 241 bp, Glycine max
  Clone ID: 701102454H1
cagcttttctacatacaaagaacctttataaaaaatactagaaaaagaaaagtataatagaaatctatttaattgtttttctttttaattttaaccgacatcagattacggtgttggtctaccacggtaggcttgcttcaaacagagctaggtttctgcgcgggggagcacagctgcgacgaccctgggcacgcctgcaggcaattgtcccccaggctgccggaaaccgctgttccggccg

SEQ ID NO: 23248 - DNA, 265 bp, Glycine max
  Clone ID: 701102455H1
atttcacatcatctcgaacgaacgggggacctctcttctttcggattcgccaagctgttgtttgtgattgtttcagttcattattaaactctcgctctataaatacacttccaaacctctttcgagatctgaaaaacatcccatggaccgtcgtaaagagaaaaatgctccatggttatcggtgccgcaatttggggactgggatcagaagggccaagtgccggactactcacttgatttctcaaagatccgggaaactaggaac

SEQ ID NO: 23249 - DNA, 108 bp, Glycine max
  Clone ID: 701102458H1
tctttttccccttttattgcatggtttgttaatcaatgtagaccaaagatagggacacaagtttaaagagagtcattgaaaagaaatccctacttccacggatgatat

SEQ ID NO: 23250 - DNA, 267 bp, Glycine max
  Clone ID: 701102459H1
ccctcgagccgattcggctcgagcacaagtgcaaattgaactaattgacctagcaaacttctcattaatcgctatagtgctagtcattaattgcacttttgaataataatgactttctattcactacgttataacgtgtttgcttctctattttgttttctctacttattgccatagcctctgctgatctatcttcagatttctatgcatcaacatgccccaatgccctctctaccataaaatctgcagtgaaaagtgcagttgcta

SEQ ID NO: 23251 - DNA, 256 bp, Glycine max
  Clone ID: 701102461H1
cccctctcggaggatgaaatcctccgagaaaagatattccgacacgtggacgaggcgtgtcgggagtgggggttcttccaggtggtgaaccatcgggttagccatgagttgatgaaaagttctagggaactgtggcgcgagtcttcaaccagccactacaggtgaaggaggagtatgccaactcacccaccacttatgagggctatggaagtcgcttgggagtgcagaaaggtgccaccttggactggagtgacta

SEQ ID NO: 23252 - DNA, 271 bp, Glycine max
  Clone ID: 701102462H1
ggagatattcccagaggatatacttacaggttgtatatcctgttggaagaaaatatatgtcagtgccttcagctcctcgcctgaagttagtatcttctcctgagctgaaagctgtattttccattgatgatgtcaagctacctcttggttggacgggatgtgcttggcagaatatcttccaaatctagaagaatatcttgggaaacaggtcttagaggctgtttcattaattgaagttagaaggcacttcattgaagcattatccagtccg

SEQ ID NO: 23253 - DNA, 269 bp, Glycine max
  Clone ID: 701102463H1
cctaaccctaggccaagatttacctgatggaaaccttggtgccttgcagaagaagggtaatgttgccaaagacaaattctccaaggtgctatggtatgccataacaaattacaggacatgggtttttgccctcctatatgggtaccgatgggagttgaattaaccactgacaatgtcattgctgagtatttctatgacaggtctaatctcaagctacacactgctggaatcatggctgcttcatttggaatggcaatctcctagctcgt

SEQ ID NO: 23254 - DNA, 263 bp, Glycine max
  Clone ID: 701102467H1
gtaatttgcaaacacaccaaaaccatctctctctctctctctctctccaattcagacccctagttctgttggatcttgcatatagtaaccctttattgattcgcaaagatgaaggtcacagtggtttctcggagtgaagagaagtggttaaaggtggcattgagctcagtgattctccaagaagtacccatcaaggcagcgcttgacacttccagtccaacctggatcaaaggaaaggcctgttgtccttaattacaaaaaga

SEQ ID NO: 23255 - DNA, 263 bp, Glycine max
  Clone ID: 701102468H1
ccaaatccgaatccaaccctctccaacgtcactctcaccctctctctgttttctgtctcttctttcttttatcacacaacaacatacacacgccctcttcttcttccttgcatggactaactcagagactaaaccaaccaaaaaaaacaacatgtgttccgcagagaaggacgggatcatgctcttcggcgtgcgcctctccgtcgtggataaccaccccacctccttcagaaagagcgctagcatgaccaacctttctcagt

SEQ ID NO: 23256 - DNA, 261 bp, Glycine max
  Clone ID: 701102469H1
cgtagatatggctgaaactgacatccaagactatctccaactcttcttcctctggttactctccatcatcgccgttagagccatactcaccaaactccgccacaagcctcgccgtccaccgggcccacggtccctcccatcatcggccacctccatctcatctccgccctgcctcaccagtctttccacgcgctctccacgcgctacggccccgccgtgcaagtcttcctcggctccgtccccgccgtggtcgtttcgtgc

SEQ ID NO: 23257 - DNA, 260 bp, Glycine max
  Clone ID: 701102470H1
agttgccggatttcgcacttgtggttggcacgaatgattgtcacagagagtgttttagcaatgattctcgtactgcgtatgctaatgtcaatggattagggtgcatggtgtggcatggggacttggttgatattcaacatttggaaagtggaggaaatacattgtacatacgcctcgctcattctgatttagatgatggtggaaaaacgaacagaattgtgataatatcaactgttgtggcggggttaatctgcctagga

SEQ ID NO: 23258 - DNA, 140 bp, Glycine max
  Clone ID: 701102471H1
gaaattcctaacatgtcccctggacgcagtgccaggggagctgaaatgcctgcaacagctgaggcgccacctctggttgccgttgtaaatgatgaattatatgctgctgattatgctgacatggaggtaaaaaaatcgac

SEQ ID NO: 23259 - DNA, 262 bp, Glycine max
  Clone ID: 701102472H1
cttactgcttacaacacatgttggtgggcttggtttgaacctgacatctgcagatacccttgtttttgtggagcatgactggaatccgatgcgagaccttcaggctatggatagagcacacaggttaggtcagaaaaagtagttaatgtccatcggctaataatgcgtggtactttggaagagaaagttatgagtctacaaaggttcaaagtctcagtggctaatgctgtcattaattctgaaaatgctagtatgaaaacaa

SEQ ID NO: 23260 - DNA, 262 bp, Glycine max
  Clone ID: 701102473H1
gaaaaaggaggaaaaggtggtggtgggcgtgccagtgccagtgtattacggtggagaaaatgaataccaaaggggaatcatccctcctaacgccgtgtttggagatccaaagggcatccccatccagcaaaccatttcagggacactcctgctcctttcaactgcccttactgcgctcataccgctctcactaccgtcagatcaaagcccagtctggcagcatttgttggatgcttgatgccaatgatgcttggagtttgct

SEQ ID NO: 23261 - DNA, 263 bp, Glycine max
  Clone ID: 701102474H1
aatccatgtacttgttgacatgcaaaatatggttgttcttgaatttgaagatcgtaaacttgtcccccttccacctgctgatccactcagaaattatacttctggtgaaacccaaggaggagttgaccgaagtgatggaaacccttgcagattattcagcctgaaggtccaagttttcgtgttaatgggcacttcattgaatggcagaagtggaattttcgtattggattcactcctagggagggtttggttattcattcagt

SEQ ID NO: 23262 - DNA, 237 bp, Glycine max
  Clone ID: 701102475H1
gtcctgttcaggccatcttttgcatgtgccacttggcctctgacacaaacttttctcttcggaaccaatcatttttcatcaacttcagcttttacacaacacttcatttacacttttgtgcttagcttcatcaacatgacaacatgggtgacccaaagagcatcatacatgagctgctacaaggtttggaattggcaaggcaactccaagtgtatctccacctgccaacttcgtccc

SEQ ID NO: 23263 - DNA, 262 bp, Glycine max
  Clone ID: 701102476H1
cgtttatttaagagacattgtggtgagttttctattagcgggtcgtgacaccatcgctgccgggttaacgggcttttttatgttgttatcgaaaagcccggaggtggaggagttgattagggaggaggtgggccggtgatgggcccgggccaggagtttccttcgtttgagcaaatccgcgaaatgcattacctgaacgcggcgattcacgacagcatgaggctgttcccaccgattcagttcgattcgaagttcgccacgg

SEQ ID NO: 23264 - DNA, 256 bp, Glycine max
  Clone ID: 701102477H1
cagaaggtagttgaaataataaacccagaggatgattacatttggattcatgattatcatttgatggtgctaccaacttttataagaaggcgttttaacagggttaaaatgggatttttcctgcatagccctttccatcgtcagacatatataggactcttccagtcagggaagagatactgaaagctttactaaactctgatatcatcggattccatacctttgactatgctcgtcatttcctttcctgttgcag

SEQ ID NO: 23265 - DNA, 269 bp, Glycine max
  Clone ID: 701102479H1
gtcggaaaagaaaatggagttgttcttctacacggtgttcggtcctttggccgcggttgtggcagttatggagctgagcaagaacaacaaggatcgaatcaacacctcttccgcattcaattccttccagaacaactacctctcgtctattccctcatgatggctggagattggctacaaggtccatatgtctaataactcgacagtacatatggatacgggaaaggggcataggacaactcttcattgctggttttggaccttcatgc

SEQ ID NO: 23266 - DNA, 250 bp, Glycine max
  Clone ID: 701102480H1
cggctcgagggcaatatgcttgtcctcctggggatagattggccagacgcaacagccttggtactggtggttcgtctgttgaagctgtatctgatagtcaagagttgagaagtgtggagtgcaatcatttgtcaaacagtggggagatgatttggatagaacagagtctcctgaagctgcttcaaattctagtgtgattacatctggtggttcctctgaagatattgtatctgtgtcagtggctgggtgt

SEQ ID NO: 23267 - DNA, 259 bp, Glycine max
  Clone ID: 701102482H1
cctgccagtagtcatatgcttgtctcaaagattaagccatgcatgtgtaagtatgaactaattcagactgtgaaactgcgaatggctcattaaatcagttatagtttgtttgatggtatcttctactcggataccgtagtaattctagagctaatacgtgcaacaaaccccgacttctggaagggatgcatttattagataaaaggtcaacacaggctctgcctgttgctttgatgattcatgataactcgtcggatcg

SEQ ID NO: 23268 - DNA, 261 bp, Glycine max
  Clone ID: 701102452H1
gagagtgacatcaagtggccatctagatgggatgcttactcgaagatggagggagctaaagtgcattggttttctatccttaattcgcttatggtgatcacttttcttgctggcattgttcttgtgatcttcctaagactgttaggagggatctgacccgttatgaggagcttgataaggaggctcaagcacagatgaatgaagaattatctggttggaagcttgtagtgggagatgttttccgtgctccatcgaatcctg

SEQ ID NO: 23269 - DNA, 271 bp, Glycine max
  Clone ID: 701102417H1
cactcttccctctcttctttctttcatccccaaatcaaaacctaaattcccaccttcaactttctcccccaaatcgagcaccaccactgtcacgcccattcatttatatttcattcgtatatatacatacagagagtgagtgaagagagagtgggaagaatggattcggatcaaggcaagcttttcatcggtgggatttcatgggatacgacggaggacaagctcaaggagcatttcggtaactacggcgacgttttgagcacttccgtcc

SEQ ID NO: 23270 - DNA, 268 bp, Glycine max
  Clone ID: 701102418H1
ctcaatagcttccttttcagcactttcactatagtatactttctgaacctctgagaatgacttcttcctcttccgcactcgttcttctgctcgcagcgattttcgtcttctccggcgtcgcacaatctccggcgtcgtctccgagtcccctgctactccaccgaaagctgccactccctcgccttcttcgtccaagtctccacccgctgtttctccgacaccttcaccttccggcgggatctctccgccatctcctccttctttagta

SEQ ID NO: 23271 - DNA, 267 bp, Glycine max
  Clone ID: 701102419H1
atttgattttgcacccttcatggtgttgattattgccatactaaacgatggtaccatcatgacaatatccaaggatcgagtgaaaccatctccaatgccagacagctggaagctgagggagatatttgccactggtattgtgtaggaagttacatggcactaatgacagtagtatttttctggatcatgaaggataccgacttcttctcggacaagttcggtgtgaggtctataaggaacagccccggagaaatgatggcagccctg

SEQ ID NO: 23272 - DNA, 269 bp, Glycine max
  Clone ID: 701102421H1
gtcagagttcagtccttgtccgaaaggtgcacagattcaatccctgagaggtatatcaaacccctcagtgaccgtccatctgatgatgccgttgctgttgatgatgccaacatcccaatcattgaccttgcagggctttatgtggtgacccagatgctcgagcctccacactgaagaaaatatctgaggcttgtaatgagtggggtttcttccagatcgtgaaccatggtgttagccctcagctgatggacatggctagggaaacttgg

SEQ ID NO: 23273 - DNA, 268 bp, Glycine max
  Clone ID: 701102422H1
cttttacaaactgaagtgaatcggaggatctgttctgttccataagatggctggacttttgggatataggagccttccacctaaggcaaagaatttggtagttgctgggggtttgacagcttttgtctttggtgcctacttcacaccatgagggctgttggaggcactgatgaactgcaggtagcaattgataagtttgaagctgacaagaacaagaatgcgggcgatgccaacatgccatcaaaggtctaaagcttgtacaataaag

SEQ ID NO: 23274 - DNA, 273 bp, Glycine max
  Clone ID: 701102423H1
cctcgagccgaatcggctcgaggtcaactctcgttcaatcaccagcgcttaagcgtgtctctgctaataccaaaacgctaccgttttgctcttttatttctctatggattgcaagaagcgagttcgggatgactcggacgagtcattctggaatcgcccgaggcgaagcgactcagggcacgatttactcgagttcttcgacgacgccgacgacgcaccttcctctcaggaccttgactccgtcatgaagagcctgcaggaggagatttccgg

SEQ ID NO: 23275 - DNA, 274 bp, Glycine max
  Clone ID: 701102424H1
attttcaagctctcaacgccatctccagctgcttccttatcagaagcgcttcgccccagagattctcgcttcctctccttcaatccttcttccaacgctattaattacaaaattaacctctccgcttccctccgatccattcactcctccctcttaaaacctccttgcggatcaaatgctcccaaacagatgggaatggaagtcctgcaaagaggacagtgcttcatgatctttatgagaaagaagggcagagtccatggtatgataatctctg

SEQ ID NO: 23276 - DNA, 271 bp, Glycine max
  Clone ID: 701102426H1
aaaacgcattgtgtttctctctttccgcggcgtagatctgagcagtttgggaaaccctaactgctctcaccactctcactgctttttttcctctccgatcaacgacctctttcgtcgccctaagtcatggcaggacttgcacccagggatcacagtttgatcctcgtcaatatgataccaagatgaatgagttgcttacatctgatggacaggattttttcacatcttatgatgaggtttatgacagttttgatgctatgggcttgcagga

SEQ ID NO: 23277 - DNA, 76 bp, Glycine max
  Clone ID: 701102427H1
attaattagtaagaagattaactgagatagcacaagggtaaaaatggaaatggaatttatcccgctgtctcccaac

SEQ ID NO: 23278 - DNA, 277 bp, Glycine max
  Clone ID: 701102428H1
gttcaagttctcttcttggaaatttcccctctaatggaggctagaaaaagagagcaaaaaaactaaaaaatgcctgcggtcggaggtataaacaccggagggggcaaggagtaccctggaagcctcactctatttgtgacggtaacatgtaagttgcagccatgggtggtttaatcttcggttacgatatcggaatttcaggtggagtgacgtccatggatccgtttctgctcaagttttttccgtcagtgttccggaagaaaaactccgacaaaac

SEQ ID NO: 23279 - DNA, 270 bp, Glycine max
  Clone ID: 701102429H1
ggaaaaggtgaagggtgaagagctgtttatctctcgagtgctgaaaaaaaggaaatagcagaaagttatatggatagcaaatcaccgagcaataaggcatctgaggagctgtcacgtgagttgcttattgctatatctgattcttaccagataaaattctggattcagattttgtgcctgaacgcaaggacacagacggatttgcaagaccaaaaggtgattggcatgacaaatttaggtctgaattgatttcaatctcctatgttgaat

SEQ ID NO: 23280 - DNA, 276 bp, Glycine max
  Clone ID: 701102430H1
gtgacgtgccctagccccatatctagtctccctctctcaatctcacatctctcgtcgccaccgccgcgccgcacggaggcacccacggaaccaatctagccatcagttgaaacagtgagcttacaaaaaatggcaactgcacctgcacaattcctacaagctttggccatgagttgagggcttgtcttcgttgccgccttgtcaaaacctatgatcaggtcttagtaccctactaccctttatttttcatcattgttttttgtttacaatttctgt

SEQ ID NO: 23281 - DNA, 273 bp, Glycine max
  Clone ID: 701102432H1
gcagtaccatgacttctgcccttgagaaggtcataaaggatattgatgcacttgatagtgctagtgagaaaatcacaggtatagtggctgatgtgaacatggcatgggccttggaactcacagataagctaggaatcaaaggtgctgtcttcgccctgcttcagcagctgttttagtcttgggtgagaacattccaaacctcattcaagatgggatcataaataccgaagggttcccgattataaaagggaaatttcaactatcccagaaatg

SEQ ID NO: 23282 - DNA, 266 bp, Glycine max
  Clone ID: 701102433H1
aggccaaacaccaacagaagatatcatgttggagaaacaacttttgaatgatgaaaagcaatgtgcagagcacataatgctagttgatttggggagaaatgatgttggaaaggtctccaaaccgggttctgttcaagttcaaagcttatgaatattgagcgctattcccatgttatgcacatcagctcaacagtcacaggggagttattagatcacttaacaagctgggatgcattgcgtgctgctttacctgttggtacagttag

SEQ ID NO: 23283 - DNA, 266 bp, Glycine max
  Clone ID: 701102434H1
agaacagaggcatcagttgcaatggctcgttacggatgaggcgcgacaagcggtggatcgtggaggagcgccccgacggaaccaatgtccacaactggcattggtccgagaccaactgcctcgcatggtccacgacggtcttaccagcctcctcaataacctccctatcctcgacggcgagggtaacctcttcctcggaacgacgtcgcttcgctccctcgacggcgaggcctacatcaatgtccgacaggggacgatcatccccg

SEQ ID NO: 23284 - DNA, 267 bp, Glycine max
  Clone ID: 701102435H1
ctctaacctacctctctatcttctctctcaacaacttcaccttcttcctacgcgatcctgtctgcacttcaagggcaagtaccatgatgagcttatcgccaatgctgcgtacattggcactcctggacagggtattcttgcgctgctgagtcaacagggacaattggcaagcgtttggccagcatcagtgtagagaacattgaatgcaacaggcgagctcatagggagctgcttttcactgatcctggtgttacttcaatatctcag

SEQ ID NO: 23285 - DNA, 266 bp, Glycine max
  Clone ID: 701102438H1
cagagagagagagagagagacactgagagaaattcgcaaaccctaatttcggacagatcggcgatggctgcctccaaggatcgcgagaacttcgtctacatcgccaagctcgccgaacaggccgagcgatacgaagagatgtggaatcaatgaagaacgttgcgaatctcgacgttgaactgactgtggaggagcggaatttactttctgttgggtacaagaatgtgattggtgctcggagagcatcgtggaggatcctgtcttcc

SEQ ID NO: 23286 - DNA, 267 bp, Glycine max
  Clone ID: 701102440H1
gcaaacttctcattaatcgctatagtgctagtgattcattgcaattttgcataataatgactttctattcactacgtttatcacgtgtttcgcttctctattctgttttctctacgtatcgccatagcctctgctgatctatctcagatttctatgcatcaacatgacccaatggcctctctaccataaaatctgtagtgaaaagtgcagttgctatagagcgtcgcatgggggcatcattgttccgtcttcatctccatgattgct

SEQ ID NO: 23287 - DNA, 268 bp, Glycine max
  Clone ID: 701102442H1
cagcactaatttatatagcaagctagctaggttgaaaatagtttggttttgtagtaagtgaggtgaggtgccaaaatggtgaagataactcttggtactttcgatgactcttttggtgttgcctctcttaaggcttatttgcagagttccatgcaactctgattttcgtgttcgctggtgttggttcagccatcgcttacaacgagcttacaaaagatgcagccttggatccaacggggctggtggcagtagctgtggcccatgcatt

SEQ ID NO: 23288 - DNA, 264 bp, Glycine max
  Clone ID: 701102443H1
gagactttcagtactccagtgttaactgttttggtgtttacatctgtggcagtattccccaccctacttttgccttctaccccttccatgtgggtggctggaatgacatttggttatggctttgggttcttgctaattatactgcagcagctattggtgtatcactcccttttgtcattggcaaactcttccaccataaaattgaagggtggctggagaagtatccgaaaaaggcttctattctaagatctgctggtggaggga

SEQ ID NO: 23289 - DNA, 267 bp, Glycine max
  Clone ID: 701102446H1
attacaacaaccaagaagggctcaattacctctgtccaagctatctatgtgcctgctgatgacttgacagatcctgctcctgctaccacttttgctcacttggatgccacaacagtgttatcacgacagatctccgagcttggatctatcctgctgttgaccccttggattctacatctcgtatgctttccccccttattttgggtgcggatcactatgaaactgctcgtggtgtacagaaagtacttcagaactacaagaatcttc

SEQ ID NO: 23290 - DNA, 167 bp, Glycine max
  Clone ID: 701102449H1
tacgaactgagagggctggaggatggagtggagatattagtaggaaaagggcacttgaagaagcctttggcagcatctgggtttgctgagacaataataatcatgcaaggctggacatgcttattttaacatggtgttagatactttctaaatcctaagggcatgca

SEQ ID NO: 23291 - DNA, 265 bp, Glycine max
  unsure at all n locations
  Clone ID: 701102451H1
ctcgagccgctcgagccgattcggctcgagcaaaacatacacctcttctctctgtttctctaccctctctacctcnctccctcttcaactaacatggcacttgaaaaccaagacaccgctgtcagagaaatcaagcccagaacaggagaatcatgggtgctggagggcctgatgatgaggacaataggtggccaccgtggttgaagccactgctgaaagagagcttctttgttcaatgcaagttgcatgctgattctcacaagag

SEQ ID NO: 23292 - DNA, 241 bp, Glycine max
  Clone ID: 701102416H1
ctcgagccgttctagatcgcgagccgccaggaattcggtccccacgatgctcaactcgacctttcccaaggaactccaaggttctacattatcaagcttgacaaatgcccgcttaagttttctagtattacacatcatgcaatcgtgactcagtgctcgggtctatcggtggtcatgtttggtatcttggagtggccaagtcatctgttgttgattcaaatgagatcaaggatgacaccgg

SEQ ID NO: 23293 - DNA, 257 bp, Glycine max
  Clone ID: 701102384H1
cgggattttgatgcccgttggtgccataatagcaaggtatttgaaggtgttcaaatctgcagaccctgcttggttttaccttcatgttacatgccaaacctctgcctacatagttggtgttgctgggtggggaactggtctcaaactcggaagtgactcggttggtattaagtataacacccatagagcactcgggatcaccctcttctgccttggaacccttcaggtttttgctctgcttttgaggcccaacaaag

SEQ ID NO: 23294 - DNA, 256 bp, Glycine max
  Clone ID: 701102385H1
cgcaaattccctcaacactggagtcactaagtgggactcggtggaaattcattctgggactcagctaagctgaccaaccatgattcaaaatggttgcattgtatcccaagggtgtgcccctctgaattctaggtcacgcaaccatgtcatacctagtacctctgtctttcgttgcgcttctcgaatgcctcccaaggttgccgtctctaacatccggagcttttggggacataatttggaatttcaatccttgttg

SEQ ID NO: 23295 - DNA, 256 bp, Glycine max
  Clone ID: 701102387H1
gaagatcaacctcctctttggtacggtgttaagaaaacctatgttgcaaaaagaagtctttcacaagaagatgtaacgattcttgtagataatcatcatgatcatggcgtgcaccacttctccgccttcaagacaaagttcggcaagacctacgccacgcaggaggagcacgaccaccgcttccgtatcttcaagaacaacttgctccgcgccaagtcacaccagaaattggatccatcgccgtccacggcgtcac

SEQ ID NO: 23296 - DNA, 253 bp, Glycine max
  Clone ID: 701102390H1
ctcgaaactgatgagttttaattaaactatgccatggtaatgaaaccgcgtttttcgtgtttcacactttgttcttgccagagtcaccccaaaacaaacctaaatcgccttctctctctctcgttcttttggccttgaaagttgaaagctccaatcttttgcatttttcatttcccttaatatttgattctttgtggagattttgcatttattcactttccttaaagtttgtttccttgtttgcgttttgtgg

SEQ ID NO: 23297 - DNA, 254 bp, Glycine max
  Clone ID: 701102391H1
ctcagattccggccactcctctcgccggcgagcccttactcttccctcctccgtcgagccctctccgattcgaatcgttcccagcctcgcaccaccatgaatcccgaatacgattatttgttcaagcttttgctgattggagattctggtgtaggcaagtcatgtcttctcctgaggtttgctgatgattcataccttgacagctatatcagtaccattggagtggactttaaaatccgcactgtggagcagga

SEQ ID NO: 23298 - DNA, 254 bp, Glycine max
  Clone ID: 701102392H1
tggcgtgcacaatcgacttccgctgtctcgacgaggacttcggcggcaaaacctacaagcgcaagacagagcagcagtcgcagcctcagcacgacgccgccgccgatgacgtcatcgacggcgcctctctgatggacaccgacgacgcactcccgccgccggcgaagcgatcggcgctaccaacgtcggagaacccggacaagccggcgttcggtcatccgagctacgacggcgtgatcgccgggagggtgtcg

SEQ ID NO: 23299 - DNA, 244 bp, Glycine max
  Clone ID: 701102393H1
ctcagaaggacagctagctatactgttaacacatgcaactcgaacgttcttctcggggacctcggcagaaggataagaggctcctagcgtgacggctgcttgtctcgcccaggaggcgggaacagctgaacacacagtggcgaccggctgcgtaatgcgtgggaatctggcgaatcctccggcgccaatcctgaacacagctcaatagcgctctttgatcaccatgcgtagtaccccgtagttg

SEQ ID NO: 23300 - DNA, 255 bp, Glycine max
  Clone ID: 701102394H1
gaaacagctatggaaggagaaaatggaaagaagctgaaaatactgtgcctccacggattcagaacaagtgggagttttcttaaaaagcaaatcagcaaatgggatccttctctattcattcaatttgatatggttttcccagatggtaaataccctgctggagggaagtctgacatagaaggcatcttccctccaccttactatgagtggtttcaattcgaaaaggacttcacagtgtactttaacttggaagaa

SEQ ID NO: 23301 - DNA, 259 bp, Glycine max
  Clone ID: 701102395H1
actgaatacaaaggagagcatcatgtcggtgagcacaagccggagcaccatggaggagcagagcacaaagaggggttcctagacaagatcaaggacaagatccacggcgaggagggtggcgccaccgccgagggcgagaagaagaagaagaagaaggagaagaagaagcatgcacatggccatgacagcagcagcagcagtgacagtgattagattatctcccactgctgcatcacctatatatcttataaggtgtatg

SEQ ID NO: 23302 - DNA, 257 bp, Glycine max
  Clone ID: 701102396H1
cagaaactctccttccaagccggtgaacgccactcccttgtatgcaattcccctttccattccatctacttcctggactcctcatcattcttaaaattaataaaaagctattaactttctattattattattactattttttaaataattgttcttgaatgaatggaattgagctctggcaggagtccttgtgtttagggttaattggtgtgagctgtgtgtctgatttcaggaaaaactctatcagtgggtctgga

SEQ ID NO: 23303 - DNA, 274 bp, Glycine max
  Clone ID: 701102401H1
cagaagcagaagcgcaaggcgatgtaaccctaattagggtttgcaagccgatttgggattcgcctttcgcgtgatcgcagcgctggatccgtaccgtgttcctccgtctacggaagcccctttcgctcgatccttcgccgatctcgaagcatgtacggtccccgagggtatgtcaacgcatcttcatctctctccttctttattccttttccatccaattgtttcttttccattttctcaatttctggggtttggtttctgtgcggtgatgctt

SEQ ID NO: 23304 - DNA, 275 bp, Glycine max
  Clone ID: 701102402H1
agcgctcttgtacatttttgggttgagctcattgatctcctcatcctctccatttttctatgattgctccacagttttcacgttacacttggtaccatttcagagagagttaattatagaaaattagacatgattttgttgggtacacttgtttcagcacactcccatcaacagcatcagcatactcatctctacctctagggccatactttaaacagcacaagccactcctatattccaaaccatccaaattcaactctcttgtaatcaatggc

SEQ ID NO: 23305 - DNA, 271 bp, Glycine max
  Clone ID: 701102403H1
attcgcttcctctctttcctcatccactatttctctccgttttctggccccaccggaaaacctcttccgttcgccggaaaaccgctttcgttttcggcgtttttttcacgtctccagaggaagctgatttcggtcttcttattcggcgtttgcattctctcgctatttgccgtggtagcttctgcgaggcgttggatctctctgtggttcggtttcagcgttgtattcagcgttcctagagaatgtggcgagcctggttgtccttcgaggc

SEQ ID NO: 23306 - DNA, 272 bp, Glycine max
  Clone ID: 701102404H1
tctagatcgccagccgccgctcctcgagccgctcgaatcgcttaattttgatttagttttccaccgcaacgcggaacctctttctcgaactggctaactctcaggcaagtcgctcggacgctgattccagcaacacgcggctggtgttgcactgtatgacgccctaaactccggcgcctccaacgccgtcgtcaagatcgtcgccgccgatctcgagtggtggttccatggtccgccctctcaccagtttttgatgcgcatgctcaccggcg

SEQ ID NO: 23307 - DNA, 274 bp, Glycine max
  Clone ID: 701102405H1
ccggtgtggcgaatgattactatttgagctcttccctctcacaaactcagaaaacaagtccaatgagcaatttccagagaatatcacacgaatcccaccctcccccagggtacggatctccttaccctccaccccaaccgggttaccatccgcaccgcctcatgaagggtaccctccgccgccgccgcctcacggatacggtgggtaccctccgccgcagccgccgcagcgtccgccgtacgactcctatcagggttacttcgataacgggcat

SEQ ID NO: 23308 - DNA, 268 bp, Glycine max
  Clone ID: 701102406H1
acggaagttgcgttatctgggattttgaaacccggggcattgctaaagagctacgagataatgaatgttcatctccaataaccagtgtctgttggtcaaagtgtggtcatcgaattcttgtatctgctgctgacaagtcattgtgctgtgggatgttatgagtggaaacacaacttcgcttaaagtttctatcttggagatatccaataatggaccaacccctacctcacgtaacaagtgtgccgatggaattacctccttctcacca

SEQ ID NO: 23309 - DNA, 271 bp, Glycine max
  Clone ID: 701102407H1
gttgatgataaattttggagaatatggtaccattactagtgctttaataatgagagatgctgatggtaaatcaaggtgttttggctttgtcaattttgaaaacccagacgatgctgccaaagctgttgagggacttaatgggaagaatttgatgataaggaatggtatgttggaaaagcccagaaaaaatctgagcgtgaacaagaactgaaaggacgatttgagcagagcataaaggaagctgctgacaaatatccaggtttgaacttgt

SEQ ID NO: 23310 - DNA, 276 bp, Glycine max
  Clone ID: 701102409H1
ctttctctctaggcgcaaaacctcgtactgtttgtggcggctaaggatgtcagggaaaggggcgaaggggttgatcacaggcaaaacctccgccgccaacaacaaagacaaggacaagaagaaacccatctcgcgttcttcacgtgcggccttcagttcccagttggccgtatccaccggcttttgaagtcaaggacaaccgccaacggtagagttggggccacagctgctgtctactctgctgctatcttggagtatctcactgctgaagtattg

SEQ ID NO: 23311 - DNA, 274 bp, Glycine max
  Clone ID: 701102410H1
cttggtgccacaccgaattttcccaattctaattacagtcgtggaagggaaactgaaagcagagtgttgttcttctcgaaatcacacacggttcagatctagagaaagatccatattctcgatggagaaaatggagcagttcattgaaacttgccgccgatggatctgatgcgatcggagaagatgaccttcgttcagctcatcatccccgtcgagtccgcgcatcggccatctcctatttaggtgaactcggccttccccaattccgcgactt

SEQ ID NO: 23312 - DNA, 274 bp, Glycine max
  Clone ID: 701102411H1
taactttttgattcctaaattctctaaaattcgaaattgcaatttcgttaggggaaagagattgttctgtgtgtgagtgagtatggctggaaaaggcgagggtcctgctatcggaatcgatttgggaacgacgtactcttgcgtcgggtgtggcaacacgatcgtgttgaaatcatagccaacgatcagggtaacagaactaccccatcctacgtggctttcaccgacacagaacggttgatcggcgatgcggcgaagaaccaggtcgctatga

SEQ ID NO: 23313 - DNA, 273 bp, Glycine max
  Clone ID: 701102413H1
atttgaaggatacaattgtgaagggatttgggttcacggcggaagatgatgttacgattacggggttcgatcctcgagacgccgaggtagggcattccgtggagtaccaattcgacctcgaaatcgatcacaaggttattcccttcagctcctcgaagacgtcaaacactgggattacgtcgatcttcccattttccgggccgaggcccaatccggtttggtccctaaacgggcttcggctgacgggcttcccgttttgggctccttcgttct

SEQ ID NO: 23314 - DNA, 251 bp, Glycine max
  Clone ID: 701102415H1
cttccttctggaactgctaatggctttttaggtgaggaaactgatggtaggccaggttgttctctagacacccgccgtgtatcttgtaaaagaaaggctgttgaacgaaatgttggacaatcttcagatggtggaagttctagctatagtagcatacagatggtagtacttggaacactcttcctactcaggcttatggggggatcagttttaacagatctgcccaacggatcaggtaaatgcgagacttg

SEQ ID NO: 23315 - DNA, 261 bp, Glycine max
  Clone ID: 701102383H1
caagctcgtcgtttcagaagcactgtctggtggagaaatgtcaagcttacgattgcacttatagtcgtcctacttgtgatagtttatgttgtattggcttttgtgtgtcatgggcctgcgctgccatcttgtttttaagtgaagaattggcaaatgaattttatgcgtgcttccttgtcttcttcagcttgcagaggtcacttctttttcatctgcctttgttatgcagacttccatttcttcaacttaaattgctgggtt

SEQ ID NO: 23316 - DNA, 265 bp, Glycine max
  Clone ID: 701102352H1
cttcttctttttcatcaatcatcaccagtggttcttttccttctgagaagatcgaattgtgttttgcaaaaatgggagttccagagaaagaccctctttcccaattgagtttgcctcctggttttcggttttaccccaccgacgaggagcttctcgttcagtatctgtgccgcaaggtcgctggccaccatttctctcttccaatcattgccgaaattgacttgtacaagttcgacccatgggttcttccaagtaaagcgatttt

SEQ ID NO: 23317 - DNA, 140 bp, Glycine max
  Clone ID: 701102353H1
aaaagactccgcgtttccccttcccctcaaccacaatcaccagacactgcaccaaacaccaacaacgctttagctctctctcttctctccataaccgccatcgtcgatctggcactaacagatcgccgctggtacatctg

SEQ ID NO: 23318 - DNA, 260 bp, Glycine max
  Clone ID: 701102354H1
gcaagatgatgagaaggaaatgaaggccagagaattgattgaagaaatttgtgatgagcttgctaaggaaattggagaagacaaggctgaaattgaagcattgaagacggaatctatgaaacttagggaagaagtggaagaggagaggaggatgttacaaatggctgaagtatggcgtgaagaacgtgttcatatgacattgattgatgcaaaagttgctcttgatgagaagtactcacagatgaataaacttgtagcgg

SEQ ID NO: 23319 - DNA, 262 bp, Glycine max
  Clone ID: 701102355H1
gaaacatttcactaatagagagacataagcataatattgagaaataatggagggttgtacttattgtgtgaagttgctatgccttgttgggtttgtggtgcttgtgagtactattgcaggggtggagagtgctggtgaatgtgggaaatctaccaccccagataatgaggcttataagcttgcaccatgtgcctcagcagcacaagatgagaatgctagtgtttctcagagttgctgtgctcaggtgaagaaaattgggcag

SEQ ID NO: 23320 - DNA, 261 bp, Glycine max
  Clone ID: 701102356H1
ttcagattatcagagagcccaagaggcccgacgattcatgatttatgttcataccaagatgatgatagttgatgacgaatacataatcgttggatctgccaatatcaaccaaaggtcaatggatggtgctagggactctgagattgccatgggtgcttatcagccctatcatttggctaccaggcagccagcacgtggtcagattcacggtttccgcatgtcattgtggtatgagcaccttggcatgcttcatgactcctt

SEQ ID NO: 23321 - DNA, 76 bp, Glycine max
  Clone ID: 701102358H1
ccaaaactctcaaaagctcaaactcaaacggtagtttaaaaaaaaaacaaccgaaacgaaatccactctcaccatg

SEQ ID NO: 23322 - DNA, 258 bp, Glycine max
  Clone ID: 701102359H1
gatcagagtacatcctaaaagccttggagaaaactgcaagtggttggagatgtttgaagagaccgatgttgtaatgttctcagttgccttatctgactatgatgagtacactacagacagtaaaggagtttctaccaacaaaatgttggtagctaagaatctctttgaaaacataatttctcatcgaagcttccataacaaaaaatttctcctagtattgactaaatttgatctgcttgaggagaagattgaacacat

SEQ ID NO: 23323 - DNA, 256 bp, Glycine max
  Clone ID: 701102360H1
gtttctactctcacagctgtctattttcttcctcttctcaactgtgtccgtgtgtatgcatttgagttgaaagccagactcaaggagctgaaagacaaaagaagaaacttggatttgaatcagccaaaatttgagttacacgtaattgcaaagataagatgagtgttatgtatagtcctgttctcaattactcagatgtggagcatcagctaaggaaaaaccaagacatggattcaagtattggacatccacacaa

SEQ ID NO: 23324 - DNA, 260 bp, Glycine max
  Clone ID: 701102361H1
aaaaaattggcgtgagtcgggccaagcaagctaaggcaaaccctcgttggcaagtttgtgatggcggcctcttcttcctctctctctgcctccgacgactcttcttctcgccgtcgcaggcgccaccaccgccatcgccgaggccgcgataaggactctctcaagattcgaaagaagagcaagtcccaatcccaatcccgcggaaaacgacgccgtaggcattaccaccactcttccgattcctattcttcatcctccct

SEQ ID NO: 23325 - DNA, 97 bp, Glycine max
  Clone ID: 701102362H1
acagggttatattatatagatacaattattaagtataggatgaatttccagctgttgtaaatctttaaaccagtaatagatgaacggaattgatttt

SEQ ID NO: 23326 - DNA, 263 bp, Glycine max
  Clone ID: 701102363H1
gaaagctcggttgcaggcagaggcaaaggctgcagaagaggttcggaggaaagctgaagccgaagcagcaactgaagccaaaagaaagagggaactggaaagagaagcagctcgtcaggctttgcaaaagatggagaagacaattggtatcagtgagagtagtcaatttttggaagatctagagatgctgagtggtttactagatgaacatttaccaaatttcacagaggaaagaagtcctgatcatcttgaaaatgggctgg

SEQ ID NO: 23327 - DNA, 262 bp, Glycine max
  Clone ID: 701102364H1
gtcgccgttcagggcttttgcatgacccgctgcgggacccacggctctacccgcaacgtcaaaaacgctgcccggacagcttatatttgggttggaaactccgaaactcagtgccccgggcaatgcgcgtggccattccaccaacccatttacgcgccccagacgccgccgttagtcgcgcctaacggcgacgtcggagttgacggaatggttattaacttggccactcttctcgctggcaccgttacgaaccctttcaaca

SEQ ID NO: 23328 - DNA, 266 bp, Glycine max
  Clone ID: 701102365H1
tgccaatgagctgggaggtgcaaagttggcaagaagaaccttatccacgatgataatccaggcgttgtcacaggtgtcattagggctaaagatgttgactatttatccagggtagcagatgataaatggacaggagatgccattatttattcccatcttggtggagaagtggtttaccttccaaaggatgcatccatcccagttaccttgaaaaccagagaatatgaagttttcacaatagttcccgtgaaggaattgagcaatgg

SEQ ID NO: 23329 - DNA, 266 bp, Glycine max
  Clone ID: 701102366H1
cctaaacaagagaaaagtgatctacgtgtgattgatgatgcacgcactgctgatcggttgcttaattggatcaacaagcaattaggcagttcatttggcctggatgatcagaaatttcaaaatgagcttctttcatccaatgtatcagaccctgggcagattgcaagagctatctatgatgtcgaagaggcaacttctacagcttttgacatcatcttagagcacaagatgataaaaccgggaactcgtgcttcacttataaagtt

SEQ ID NO: 23330 - DNA, 257 bp, Glycine max
  Clone ID: 701102368H1
gcaacttttggtctctctgcagaatctcattccaattggagttcatcctctaaaaggaaaggtggtgtttggactctgggaaaatgggtttgttttctgggatttttatgggggtgttgttcggcatcgcattgatggctggatgggcacgcatgatgaggtaccgaagtgccaaacgaattgcaaaggcagctgacattaaactccttggatcccttaacagagatgatttaaagaaaatttgtggtgataatttg

SEQ ID NO: 23331 - DNA, 258 bp, Glycine max
  Clone ID: 701102369H1
atcgaattgctgtcgttagaagaggtgatttggaggatgtagaagagggaacagaagaccacaagtacccaagaatttcatataaacaacttagagaggccactggaggcttcagtgcttcaagcttaattggttcaggccggtttggacaagtctacgaaggaatgctacaagataatacaagagtagctgtgaaggtgttggatacaacgcatggtgagatttcaaggagctttagaagggaatatcaaattctga

SEQ ID NO: 23332 - DNA, 159 bp, Glycine max
  Clone ID: 701102370H1
ctgaaaagggttcttttctttcctttaaaaatttatacttcctctcttctgcacaattaaatttactatttctaaaatttacaaatttgttgaaatgaagctgtgcgcaaggtaaatatgtgtgcaaattgcccaatcttttcaaaggttggaccgtaa

SEQ ID NO: 23333 - DNA, 93 bp, Glycine max
  Clone ID: 701102371H1
gcaaagcaggagagagaggggggatgacaccacatcctctgttttcattctcattcttagttttccctgccattcaaatttccacacaacata

SEQ ID NO: 23334 - DNA, 260 bp, Glycine max
  Clone ID: 701102372H1
atacaaagcattgaattcaaaaacttaagttcattccttgtgttttgctttcttcctcaaaaccaaacatgtcgaacacatgcggcaactgcgactgcgctgacaagactagctgcaccaagggaaacagctatggtgttattgtagagactgagaagagttacatcgagactgttgtcatggatgttccagcagctgagcatgatgggaagtgcaagtgtggcactaactgcacttgcacggactgcacctgtggccat

SEQ ID NO: 23335 - DNA, 260 bp, Glycine max
  Clone ID: 701102376H1
atcctaatcagaaaaaaaaaaccctagtaatgccgccgatggggaggaagcgaaaggtagcacccaaatcttctctatccaccgagccacctctcaagcagcaacaaccaaaacccgaaaatccccctcaagaatacgaagaagtcgaagaggaagttgaggaagaagaggtagaggaagaggtcgaagaggaagaagaagaagaagaggaggacgaggaagaagaggaggaggaagaagaagaagaagaagaaaacgac

SEQ ID NO: 23336 - DNA, 257 bp, Glycine max
  Clone ID: 701102377H1
cttgttcggtggtggcagtggtgcatggagaggttacaaaaaagagaaagaagagcttgcaaaaatgatgtcatttttaattatttttttaaaaaaattttcttatgtaatctcatttaggcaaaaaatacacatgatattacacttcacatgcctcggagtctaagccacgcaagtagataatcgactaataaagtttttaaaatattagacatccgattaaaaataaatttattaggacttaagtgacaaaatat

SEQ ID NO: 23337 - DNA, 259 bp, Glycine max
  Clone ID: 701102379H1
ccttctcaaactagtagtattattcttccattccgttctacatataatcattcataatgggtgttttcacattcgaggatgaaatcaactcccctgtggctcctgctactctttacaaggccctagttacagatgccgacaacgtcatcccaaaggctcttgattccttcaagagtgttgaaaacgttgagggaaatggtggcccaggaaccatcaagaagatcactttccttgaggatggagaaaccaagtttgtgct

SEQ ID NO: 23338 - DNA, 254 bp, Glycine max
  Clone ID: 701102380H1
cacgcgccaagcctccttcgccgccgccgacaagagtctcgctcattctcccaggctttccatgcattcttcccactccaacccccgcagattctcgtcggagcgcgacggcgagaatttcggcgttcgccgggatctgaaccgaaccggatcgcgctcgttcccgccgatcgtgcctcacgaagaggaattcctctccgacgccgctccgcgcaagctcggaatccggccggaggatctacgattcggaggtg

SEQ ID NO: 23339 - DNA, 260 bp, Glycine max
  Clone ID: 701102381H1
gcaacagtagtagtagggagactgactcttttatgaaactaggatctaaccatattaatgatatagactctggtgtattatgtagaaagccagggaaaagaacggattaaaaattttattaacagggagttccgcgacagtaaataatgagggatgctctctactaatgtactctttggaggcggcgttctttttacaaaaattggccacatcagtttgccaataacttaactagatgtagataatatagattgctgtta

SEQ ID NO: 23340 - DNA, 266 bp, Glycine max
  Clone ID: 701102382H1
tcgaactcgagcgaatcggtcgagcaagaagaggaagttctgcttttagaagagcgtgttggagaggccaaaagattagccgtcatgaaaatgaaggagactggagggaagaagaaacggaggggcgaagaagattatgatggagaggatatagacaagtacttgggtctcaaggaaggaaaatcatccaaaaagtttagaagaagatgagatcatatcactgccaatgagtgaattaatgcgacggataaatgaatcatatgaag

SEQ ID NO: 23341 - DNA, 268 bp, Glycine max
  Clone ID: 701102350H1
caaacacgctgttcctacaatcattccaaatgtgcccttccggtcgcaccctcctcccttcctccgtctccgatttccgaccggcattcgacgtcctcgatgccgaccgcgacggcaaaatcagccgcgacgacctccgcgccttctacgccggagtcggcggcggaggagatgacgtgatcggggcaatgatgacagtggctgacaccaataaggacgggttcgtggagtacgaggagttcgagcgcgtggtctcggcggagagaaa

SEQ ID NO: 23342 - DNA, 265 bp, Glycine max
  Clone ID: 701102318H1
aaaaattcaaccatccaagtctatctatcttagtgccaattcacatgtctgcccatcacaacaaaagaaaaatagactaaaatgaaaaaaatactcattaaataataaaaaatactttctctctccggtctctctatctttttaatgaatggaaatggaacgaggaacttttttgttgttgttgtacatgatggtgagaaaactgagaaggttgggtaatttggccgtgagattcaatgttcgtctttctttttttttttttttt

SEQ ID NO: 23343 - DNA, 273 bp, Glycine max
  Clone ID: 701102319H1
gggttcgtacgggaagaagaaaggttcaccggaagacattctggaaaccctaggagacttcacgagcaaagagaactgggacaagttcttcacccttcgcggtgattccttcgagtggtacgccgaatggcccaacctcagggacccactcctctccctcctcaaaaccgttcctctcccgcttcagctcctcgtccccggctgcggcaactcccgcctctccgagcacctctacgacgccggccacaccgccatcaccaacatcgacttctc

SEQ ID NO: 23344 - DNA, 267 bp, Glycine max
  Clone ID: 701102320H1
caaaatttagaaacaaaaacatgttggtgaaggtgtacggtccaacctatggagcccccaagagggtgctggtgtgtctgattgagaaggaaattgagtttgaaacagtacatattgatctcttcaagggagagaataaggaacctgagttcctaaagctgcagccatttggatcacttcctgttattcaagatggtgattatactctctatgaatctcgtgcaataatcagatactttgcagagaagtataaagaccaagggacag

SEQ ID NO: 23345 - DNA, 270 bp, Glycine max
  Clone ID: 701102321H1
gttcacaagaagattccggttctcatccacaatggcaaacccatttgtgaatccctcattgctgttcagtacattgaggaggtttggaatgacagaaatcccttgttgccttctgacccttaccagagagctcaggctagattctgggctgattatgttgataagaagatatatgatcttggaaggaagatttggacatcaaaaggagaagaaaaagaagctgccaagaaggagttcatagaagcccttaaattgttggaggaacagctg

SEQ ID NO: 23346 - DNA, 269 bp, Glycine max
  Clone ID: 701102322H1
cagctatacttgttccttttgaaggttagaagtgctacaatacaaacaatggcagctactcaggaagatgtgaagcttttgggtattgtgggaagcccatttgtgtgcagggtccagattgcccttaagttgaagggagttgaatacaaatttttggaagaaaatttgggcaacaagagtgatttgcttctcaaatacaaccctgttcacaagaaggttccagtgtttgttcacaatgagaagcccatagcagagtctcttgtgattgt

SEQ ID NO: 23347 - DNA, 267 bp, Glycine max
  Clone ID: 701102323H1
ctcgagccgctcgagccgattcggctcgaggaaaagaccatcaaagtttcacttcagccttatccggactagggtttcggtttttgacccaacctttgacgtatctaaaccttaagtttcggatcaggtctgagcaatctggttggtagaacctttggtcttagagagtcaagttttatgtctgaattagacgatcaaattcctactgccttcgatccttttgctgatgcaaatgctgatgactcgggtgctgggtcaaaggagtat

SEQ ID NO: 23348 - DNA, 266 bp, Glycine max
  Clone ID: 701102324H1
caagtttgaagtttcagacggacaagccgtggatgacacagctcgctgctgttgcttgtttgtcccttgctgcgaaaacagaagagacccatgtgccactcctcttggaccttcaagtggaggagtcaaggtttgtgtttgaggcaaagactattcagagaatggagctgctggtgctgtcaactcttaagtggaggatgcttccggtgaccccaatttccttctttgaacacattgtgagaaggcttggtttgaaaagtcgcttg

SEQ ID NO: 23349 - DNA, 264 bp, Glycine max
  Clone ID: 701102325H1
cagaaaccctaatttcctcgttatttcgatactctctccctttggaaaaaatcaaaggtgctcgcagtcgcagcgattagttcaaagattgtaagcgatcgtgaatcgtcgacaaaggttcgtgtctgaattgaagtagtgtcatcaccatgagattgagaaagggaaataaggtggagatccgtgccaatgctgatggacttagtgtggaatggtgttgtgctcgtataatttctggtgatggacacacctacagtgtccagt

SEQ ID NO: 23350 - DNA, 265 bp, Glycine max
  Clone ID: 701102326H1
aaaagcttgatggtgatgctgctttgaataaattgttccgtgatatttaccaaaatgcagatgaggacatgaggagagcaatgagcaagtctttcttggagtcaaatggaacagtgctatcaactgattggaaagaagtgggatcaaagaaggtggaaggcagtcccccagaaggtatggagttgaaaaaatgggagtattgattcggtacttaaatattcatttgagctgatgcttgtgagagttcaagtttgtctcctcccaa

SEQ ID NO: 23351 - DNA, 263 bp, Glycine max
  Clone ID: 701102327H1
cgcgagataatgatcgcgatcttgatccctcctctcggagtttgctttcgccacggttgttgcagcgtcgaattcatcatctgcttgctcctcacaattctaggttatattcctggtataatctatgctctctatgctattatcttcgtcgatcgtgaccagtactttgatgaatacaggcgtcctctctatgcacaatactgatgataattttagtttgtatgcctatgagtgatgctcatgttgatcgtgtgcttaattac

SEQ ID NO: 23352 - DNA, 263 bp, Glycine max
  Clone ID: 701102328H1
agcatcatttccaaacaaaaccaaatcacatttcccgtttcattggtattgatggatccggagcagactttcatacgcgtgcaggagaggttttctcagatgctgacgcccaaagtcagagttgctttggagtatctctacctgttcatcgccataaccttattctgcattctcgttgttatgcacgccaattacgttcaacagcctgggtgttcaagtgagctatccggagtagtgacatcagaagcccaacttattcagat

SEQ ID NO: 23353 - DNA, 141 bp, Glycine max
  Clone ID: 701102329H1
cctcgagccgattcggctgacgaaagaaagaaacctaacagcgccatagcgttctctaagctatcgtgcgaggtccctcgacctccgcacaaccccagcaccaaggggctgtgcctgtcgtcgtcttccacgcccatgtcg

SEQ ID NO: 23354 - DNA, 152 bp, Glycine max
  Clone ID: 701102330H1
cctcgagccgattcggctcgagttcaccggaaagttttcaaagccaagcaaatacgagatttacccaattttcttgcacttgaattttccactgttcaatcttcaaaatcacatttttctcgatcttcaccttctgggttgctttttttttt

SEQ ID NO: 23355 - DNA, 264 bp, Glycine max
  Clone ID: 701102331H1
gaagaaccgtgtcaagggtttgttcccatccgcaagttacagataacagactcggaagttgatgattatgattctgatgggaagatggggaatggtttctactgtcaagagatgtatcctggtgaggatggacaactctcatggttcaatgctggtgttagagttggtgttggaatcggccttgggatgtgcgtagggcttgggattggtgttggactgctcatgcgatcgtaccaaacaacaactagaaacttcaggaggaga

SEQ ID NO: 23356 - DNA, 264 bp, Glycine max
  Clone ID: 701102332H1
ggaggatggaaagaaagtgaataactttctggaaatggataggggggaaggagtgaatgatggtttttctggacctggaccaaatgattcacttattcatggtcttattgatgatgtagccttgaattgtcttgcttgggttagtggatctgattatgccgtgctatcgtgtattaataaaaggttcaataaactgatcaatagtgggtatctatatgggttgaggaaacaattgggggctgtggagcatttggtgtatatggt

SEQ ID NO: 23357 - DNA, 271 bp, Glycine max
  Clone ID: 701102334H1
gccagtagtcatatgcttgtctcaaacactaagccatgcatgtgtaagtatgaactaattcagactgtgaaactgcgaatggctcattaaatcagttatagtctgtttgatggtatctactactcggataaccgtagtaattctagagctcatatctgcaacaaaccccgacttctggaagggatgcatttattagataaaaggtcaacacaggctctgcctgttgctttgatgattcatgataactcgtcggatcgcacggcctttgtgc

SEQ ID NO: 23358 - DNA, 198 bp, Glycine max
  Clone ID: 701102336H1
ctcgagattcggaagagctcaaagtcatgatttagctgatgctgtgaagaaatgaaagaaaagcgcaggtttaaggagcttctgataatggtggatacctgccaagcctctactctgttctcccagcttcattcaccaggtgttgtggcaattggaagtagtaagaaaggaggaaattcatattcacatcatgtggac

SEQ ID NO: 23359 - DNA, 272 bp, Glycine max
  Clone ID: 701102338H1
ttcggtcactcgagcgaatcggctcgagggaaatgggaacccttgggagaccgatctacagcgttggtaactggattcgagggactcgacaggccattgatcgtctcggttccctcctccagggcggttactacgtccaagagcagctgtctaggcatcgaactctgatggacatatttgataaggctcctgttgttgatgaggatgtatttgttgcgcctagtgcctccgtcattggagacgttcaacttggaagaggatcatccatttgg

SEQ ID NO: 23360 - DNA, 266 bp, Glycine max
  Clone ID: 701102339H1
cggctcgagggaagttgtctgagtcagacccccaattgcagttccaataccacagaggccctctcctcacaggcaaaatctccgtaaacctaatttggtacggtaagttcaaaccttctcagaaagccattgttgctgatttcatcacctctctctcctcttccaaacccctcatcgcccaaccatccgttgccacgtggtggaaagccaccgacaaatactacaaaaactcgttccccaaacttgcactctccctagggtgccaa

SEQ ID NO: 23361 - DNA, 265 bp, Glycine max
  Clone ID: 701102340H1
gagaattgttcctctcttctcttccattcgtgtacgcgcaaaagaatcatgacgagttcctctgctgccgctcgcaagaatctgagtaagattgcctgcaataggctccagaaagagctcgtggagtggcaggtcaatccccccactggtttcaagcacaaagtcacagacaatctccagaggtgggtggttgaagtcactggagctcctgggacactttacgctaatgagacctaccagcttcaggttgattttcctgagaatt

SEQ ID NO: 23362 - DNA, 222 bp, Glycine max
  Clone ID: 701102342H1
cttaggagtctttcttcctttgtaatagaaagcacgcgtttctctctctcgctatctcaacgaatatctgtgtagttcaagccccaatccgcaacatccatttacaaaatatagttcatcggaatactctcaattttccggccagaaaccggcgaggtcgccggagaaatcgagcttctctcagacttgtagcctgttgagtcaatacatcaaggagaaggg

SEQ ID NO: 23363 - DNA, 263 bp, Glycine max
  Clone ID: 701102343H1
caagaattcatctattcatttcagtccatcagcatggcgaaggagaagaaaaacttgtccaacaagaacaaacagccaagcaatgcagacgaggttcacttccgcggagtccggaagcgcccctggggccgctatgccgccgagatccgcgaccctggaaagaagacccgcgtctggctcggcaccttcgacaccgccgaggatgccgcccgcgcctacgacgtcgccgcccgaaacttccgtggccccaaagccaaaaccaa

SEQ ID NO: 23364 - DNA, 264 bp, Glycine max
  Clone ID: 701102344H1
tcgaccagaggagtttgagaatggcaacgatcagcgcggttcaggtggagttcctggagtttccagcggtggttacttcaccagcctccggcaagacctatttcctcggcggcgcaggggagagaggattgacgattgaggggaagttcataaagttcacaggcataggagtatacttggaggataaggcggtgccatcactcgccgctaagtggaagggtaaaacttcagaggagttagttcacaccctccacttctacaggg

SEQ ID NO: 23365 - DNA, 263 bp, Glycine max
  Clone ID: 701102347H1
tctactctcacagctgtttattttcttcctcttctcaactgtgttcgtgtgtatgcatttgagttgaaagccagactcaaggagctgaaagacaaaagaagaaacttggatttgaatcagccaaaatttgagttacacgtaattgcaaagataagatgagtgttatgtatagtcctgttctcaattactcagatgtggagcatcagctaaggaaaaaccaagacatggattcaagtattggacatccacaacaacactgtcac

SEQ ID NO: 23366 - DNA, 272 bp, Glycine max
  Clone ID: 701102317H1
gtcgaaaaaaaggacttaacttcaatcgtagatggtttatatgcaggctattcgatgttggtgatgtctccacctcctagctccgttccgttaccggctttcatcactaagaagattgcggttgttagtgacgccacgagcgacttgcggaaaatgttacggcttgattttccctaatcctgtggcggtttgtgaatgaacgaggatttgaacggaggttgttggtgattagggcattgtagtgctcgatcttctcttattttttcagcggg

SEQ ID NO: 23367 - DNA, 261 bp, Glycine max
  Clone ID: 701102285H1
catcaccacataaaactaacttgggtagtgccttttttctttctctctatcgattctcgcaacaaaccctacccttttttagtcttcgaatttttcataatcgtaatgggttccgaaggatccagcgtttcgttcctaggaatttcagattattgcaagagcttgagagaggtgagaagggaattggggatggcaatgttagctatggaatggatgacgctgacgacatatacatgcaatcttggactgggactatcattg

SEQ ID NO: 23368 - DNA, 260 bp, Glycine max
  Clone ID: 701102286H1
cgacctcgtcatgcagaccaaacagctcggccgcctccccgtcgtccacttcgccgccggcggagtcgccacccccgccgacgccgcgctcatgatgcagctcggatgcgacggcgtcttcgtcggctcggcgtcttcaagagcggcgatcccgcgaagcgtgcgagggcaattgttcaggccgtgactcacaccagtgaccccgaggttttggcagaggttagttgtggattgggggaagccatggttggtatcaattt

SEQ ID NO: 23369 - DNA, 259 bp, Glycine max
  Clone ID: 701102287H1
tgggagtgctgctgattggagatatgctgcagagcagtttgtgaagaagcttccagataaagtgattgtacacctgaatgcaattcttcaaaattgacgtttgatggtgttgatacaatgggcgagagctagctgaagagaggtgcagaagatatcctttgtggcgcattctctaggaggcttggtggcaagatatgctattgggagactttatgattattcttcaacattggcacttgttggtaccagtagagactat

SEQ ID NO: 23370 - DNA, 254 bp, Glycine max
  Clone ID: 701102289H1
ccgcactccaccgctttacgccggttatcagggaaggagcagagggcgtagagcgccgtggcggcttcttttctttcccttcccttcccgtcgcggaggagtgtcacgagggcattgatggagcccggcacgctccgatggtggccttgttgacgtggaggacggcgaggctggtgagcagggtggcggcgagggcgcggcagtcggagggggcggcggaggagaggaggagagagattaaaggggagaggagg

SEQ ID NO: 23371 - DNA, 257 bp, Glycine max
  Clone ID: 701102290H1
ggaaccgccatcgccgcaacagcctccgcaaccgccatcgcgcactgccaccatcctcggaaagtaccagctgacgcgcttcctcggccgtggcagcttcgccaaggtctaccaggggcgatccctcgtcgacggtgccgccgtggccgtgaaaatcatcgacaaatcgaaaaccgttgacgccggcatggagccacgcataatccgcgagatcgacgccatgcgccgcctccaccaccaccctaacatcctcaaaa

SEQ ID NO: 23372 - DNA, 255 bp, Glycine max
  Clone ID: 701102291H1
ctctgcttcaatggggaagggaacagggagcttcgctaagaggagggacaagacccacactctctgtctgacgtgtggccgccgcagcttccaactccagaagactcgctgcgccgcttgtgcttcccccgctgcacgcacgcggaaatataactggagcgtcaaggcaattcgcagatagaccaccggaactggcaggatgagatacttgcgtaacgtgcctcgccgtttcaagagtggcttcagagaagcgta

SEQ ID NO: 23373 - DNA, 255 bp, Glycine max
  Clone ID: 701102293H1
ctgatgctcagatttgtgtttggaatactgatggatgggaaaagcagaagtctagattcttgcagcttcctcctgggagaacaccaccagcacagtcagatacccgtgtacaatttcatcaagatcaaatacagttcttggttgtacatgaaactcagctcgccatttatgaagcaactaaattagaaggactaaagcagtggttcccgcgagactcatctgcaccaatatcgtatgcaactttctcatgtgata

SEQ ID NO: 23374 - DNA, 255 bp, Glycine max
  Clone ID: 701102294H1
ggagtttggagcgactgaactaatcattaatttgcactcgctgtttcagcttcatcacccttcttttgcatcatttatatctcttgagaaatggcacaagaaacctttctattcacatctgaatctgtaaacgacggtcaccccgacaagctgttctatcagatctctgatgcagtacttgatgcgtgccttgaacaggaccctgacagctaggttgcctgtgagacttgcaccaagaccaacatggtcatggtc

SEQ ID NO: 23375 - DNA, 258 bp, Glycine max
  Clone ID: 701102295H1
ccctcgagccgattcggctcgagcggctcgagctcccttcttccttgtctctttctcttctcaacaacatgcagatcttcgtcacgactttgactggcaagaccatcaccctcgaggtcgagagtagcgcaccatcgacaacgtcaaggccaagatccaggacaaggaaggtatccctcctgaccagcagaggttgatttttgctggtaagcagctggaagatggtcgcactcttgctgattataacatacaaaagga

SEQ ID NO: 23376 - DNA, 258 bp, Glycine max
  Clone ID: 701102296H1
gcttggttgcagcttcagcagcagcggcaagcaactccatccgcaatgggaatcgatttgaaggcaggaggtaagtccaagaagaccaaacgtacagcccccaaatccaatgatatttacctcaagctctcgtcaagctgtaccgttttcttgttcggaggactggtagtaacttcaatgccgtcatcctcaaacgccttttcatgagcaaggtcaacaagcccccgctatccctctctagattgattcgttacacca

SEQ ID NO: 23377 - DNA, 277 bp, Glycine max
  Clone ID: 701102301H1
cgctcattatatccctctctttctatagatatctacactgatatcatggataagaatgccctctttaggtttcttcttgttcttctgactctttcctgcgttgtatttgttgctgctgttcctgcaatcagaagctccatgattgggaaaattgatcctttagtgcaagatcttctggctaaggaggatccagttatgcggttaaggaatagcgaggaagaaatgcaagaagggattgtagagagcagaatgttgatggatattgtggactaccccc

SEQ ID NO: 23378 - DNA, 275 bp, Glycine max
  Clone ID: 701102302H1
cctcgagcgaatcggctcgagggcatgttatgattcaaccagcattagaaattcctcacctggactagttgtgccaactattgatctagtgctgcgaggtggagtgcagtggactatttatggagccaattcaatggttatggcaaagaaaaacccagcacgtcttgcaattgttgatggagggacagagcctagaatgtcgttcgttaaagcttcaattgtcatcggtggatatcagttggaggacaatcctccggagtttgatgtggctcccc

SEQ ID NO: 23379 - DNA, 273 bp, Glycine max
  Clone ID: 701102303H1
ctgtgacatacggtttaattgtttatgccatgatcggatttgactggactgcagagaaattcttttggtatctatttttcagtttcttctcattgttgtactttactttctacggcatgatggctgtgggagtgacgccaaaccaccatgttgctgccattgtggctgctgcattttatgcaatttggaatctcttctcaggatttatcgtcgtaagacctaaaatgcccgtgtggtggagatggtactattgggcatgtcctgtggcttgga

SEQ ID NO: 23380 - DNA, 189 bp, Glycine max
  Clone ID: 701102304H1
caaacagagaccagccatggacggtgattcctcttggagtgctcgactctcttccgcttccaggcgctaccaatccgctcttcaatctcgatcagacatgttcatgggttttgatgcaaatgatggggacgatgatataagagaggagtttctctgcccatcatattcagagcattttgacaccgatgg

SEQ ID NO: 23381 - DNA, 261 bp, Glycine max
  Clone ID: 701102306H1
tgccaaactaagaatgaagcacgagtagatcgtccaagaagggcaaacttcaaacaagagactcactacacagcgatcaaaacctctctctacttcaacggtgatggcttcgctgtctacgattgcaaaggccaactcgttttccgcttcgactcctacggtccccgcgcgcgtgacaaggacgagctcgttctcatggatccccatggccgttctcttctcactctccgccgaaagaaaccgagtcttcatcaacgctgg

SEQ ID NO: 23382 - DNA, 229 bp, Glycine max
  Clone ID: 701102307H1
atccaggcttgtttcttgacaggatatcttcaaccatctctaatgctttcaagcttctttctggagcaacatttcttggtgcaatcttatgcttgatcgatttccttctcaagagatagtctggtttcatagtcttcttcactataggtgaactacccctatggctcactcaggctcctacaaatcatgtttcactacgttgtgtaaaacatagtctatggccactgtc

SEQ ID NO: 23383 - DNA, 267 bp, Glycine max
  unsure at all n locations
  Clone ID: 701102309H1
cagcattcaccctnntgtggaactgtgaacagggtgacaatactgacagaccaatttggtcaaccaaaagggtttgcttatgtagagtttgttgagattgatgctgtgcagaatgctctcctgttaaatgaatcagaattacatggtcgacaactgaaggtgtctgccaagcgtacaaatgttcctggaatgaagcagtattttggaagaagacctgctggtttccgatctaggaggcctttcatgcctgctccattctttccacca

SEQ ID NO: 23384 - DNA, 110 bp, Glycine max
  Clone ID: 701102310H1
aatcgagccgattcggctcgagcactccatcctctctctcttctcatcttctgttctctaatttcctgctcttgtttcttagaatccgtacggtctaatccacacaacat

SEQ ID NO: 23385 - DNA, 262 bp, Glycine max
  Clone ID: 701102312H1
cgacaataaccatgggtatctccaacatcgcttctccttttgactacatcatcttcgatttggacgacaccttgtacccctccagcaccggaattgacaagtgcgtcaagaaaaacatccaactctttctcatccagaaatgcggactctcagaatccaaagccttgacccaacgagtcgagctcttcaaaacctacggaagcacccttgccggcttaagagcacaaggcctcgatatcactgcagaggactaccacggttt

SEQ ID NO: 23386 - DNA, 263 bp, Glycine max
  Clone ID: 701102313H1
gagaacctcttttcctttcgatttaccttcgattcatacaagctcacctctcaattttggtttatcattcctagaagaaggaaccatcaatcattgacatggccatggcatatgttgctaggtcatcagagtcatctcaagtgcttactttccattccactgctaaatggaatgctcaccttgatgccttgaaacaaactaacaaactgatggtggttgatttcactgcatcatggtgtggaccttgcaaactcatggatcca

SEQ ID NO: 23387 - DNA, 265 bp, Glycine max
  Clone ID: 701102314H1
cattaatcactttctttaaggaaactaattaacatgggaggaaggggtcacatggggtggttcctcttctgttgttgttcttcttctctcctttttttttgttgcttcttcttcttctgtgtcacccagaagaaacttgcccatcatagcctttgaggatggctacacacccttgtttggtgaccataatttggccatccatagagatggcaaatcagttcacctttcacttgatgaaagaacaggttctggatttgtgtctcat

SEQ ID NO: 23388 - DNA, 265 bp, Glycine max
  Clone ID: 701102315H1
actcgagccgctcgagccgattcggctcgagcaaaacatacaccacttctctctgtttctactcactctacctctccctccctcttcaactaacattccaattgaaaaccaagacaccgctgtcagagaaatcacgcccaagaacaggagcatcatgggtgctggagggcctgatgatgaggccaataggtggccaccgtggttgacgccactgctgaaagagagcttctttgttcaatgcacgttgcacgctgattctcacaag

SEQ ID NO: 23389 - DNA, 268 bp, Glycine max
  Clone ID: 701102316H1
gtaccttggagaagaaactttgtatagcaaaaatgataaaaaccaatagctcccaagattggcctgagccaataatccgtgttcagtccttatccgaaaggtgcacagattcaatccctgagaggtatatcaaacccctcagtgagcgtccatctgatgatgttgttgctgttgatgatgatgatgatgtcaacatcccaatcattgaccttgcagggctttatggtggtgaccctgaagctcgagcctccacacttaagcaaatctc

SEQ ID NO: 23390 - DNA, 263 bp, Glycine max
  Clone ID: 701102284H1
tgaacatagttgaaggaaccacaatattgaagcttccacaaggttccaatgacgtgcttctaaaaaatctctacctttcctgtgacccttacatgagaatgctcatgaccaaggtggaaggcctcgacggtttggcacctatacacctggctctccattaacagggtatggagtgtccaaagtcctagaatctggacacccagattacaagaaaggtgatttagtgtggggatctacaaaatgggaagaattcagcttggtgt

SEQ ID NO: 23391 - DNA, 265 bp, Glycine max
  Clone ID: 701102252H1
cattattttcattcctactaacactccatctatcactatcaggggtaatttcaaccactttcactctagttaacaaatgtgagtacacggtgtggccgggaattctttccaatgctggtgttcctcctctttcaccacaggcttcgttctccaaaccggcgcgtccactacaatcgccgcacccgcgtcttggggtggccgtttctggggcagaacattatgctcccaggactcaaccagcggcaagttctcctgcgtcaccggc

SEQ ID NO: 23392 - DNA, 97 bp, Glycine max
  Clone ID: 701102253H1
caaaaactcaacgcaaagagagaaagcacgacagaacacaagaccccgttagacttggtgtatattgtgtgtctgtctgtgttgttccacagaacat

SEQ ID NO: 23393 - DNA, 263 bp, Glycine max
  Clone ID: 701102254H1
tgaagatggagttgatgttatacgcgaatacggtgttgaaggatacccgtttacatcagcaaggatccaagagttgagagatcaagaagaggaagctaggaggaaccagtccgtgagatctctcttggtctctccatctcgggacttcgtaatatcatctgatggaaagaaaacacttgtctctgagcttgagggcaagacagttggtctgtatttctgcgtgaagtcattcggatcatgcagtgactttaccccaaagcttg

SEQ ID NO: 23394 - DNA, 159 bp, Glycine max
  Clone ID: 701102255H1
cgtcattttgaagcagccaataagttagaaggaagtggatgagaaagaaaaacaaactaattggctgcttcaaaatgacttattcatgtctagtttatgtttcagtgatggttttgttactagaattctgagagtaaaaaatacatattttgaatattt

SEQ ID NO: 23395 - DNA, 258 bp, Glycine max
  Clone ID: 701102257H1
ctccatttcgccattctctccgcgcaccgttttccggcgcagtccccggcgagtcaccgtcgtttccgccggcaagtctctctcaccgttgccatcctccttcagatagtatatatttctcatataatgttccgttattagagaagttgagaaaatggacggccatatgggactgaggaaaatcagctctcactgctctatccctgatttggatgattctgctatcttacgtttgcttgacaagccaaagttgaacat

SEQ ID NO: 23396 - DNA, 257 bp, Glycine max
  Clone ID: 701102258H1
gtttttggaatcagctactacatatcatcgccaggtccaagcttctgtccaagagacactgaaaaagcatgagcttactagacctcttgctactaaagagttggaatggtttgcggcctctgccctttggctttacctattgttttaatggctagagtgttttcagctgttttctgtagcaaaaaagtgagtaaacctgctcgaaatggaaacactcaccatgcacgacgtaaacctaagcgagggcatctagacaa

SEQ ID NO: 23397 - DNA, 254 bp, Glycine max
  Clone ID: 701102259H1
cagaaaagcgtgtcgaatggatttcacggagaaggatctattcggcgaagattccgacaacgacaacggcccccactcctccggttcctcttcttcttcctccgccgcttcctcttcctcatcatccccgcctcctcttccgcctcttcctccaaagccagcgacgccgccgccgactcctcctccgccagcggcgcgcaagcagcggcgccgaaaacgacgacgaagacaaagatctgtttggctccgataat

SEQ ID NO: 23398 - DNA, 178 bp, Glycine max
  Clone ID: 701102260H1
ccggttcagcggcatgccataccgatatcccttgcggggcgggatttgatggcttgtgcgcagactggttctggaaagactgccgcattctgtttcccaatcatcagtgggattatgagaggccaacccaagtcctccagaggccgcctcctcgcggtgtccgcacagtctacccact

SEQ ID NO: 23399 - DNA, 255 bp, Glycine max
  Clone ID: 701102262H1
caaattgtgaaggagaatttcgacttcagacctggaatgatcaccattaacttggaccttaagaggggtggtcataggttcctcaagacagctgcttatggacactttggaagggatgatgcagactcacctgggaagttgtgaagccactcaagtcagagaagcctcaagcttaagagtgttgttaagttaatcactcccttcagtggatgtcttgctgggtgtggatgaataatttgcgtgtttcatgactac

SEQ ID NO: 23400 - DNA, 279 bp, Glycine max
  Clone ID: 701102264H1
cctcggtcttcggctcgatgttgacgacggcaacgttcaaggagatcaagaaaacctctgaacactcacaataccatcccgttaataaaaacaagtctctctctttctctcttcttcgttgcccgacggttgatgtttgatatagaagtcacctaaacacatggggacaagcagttttctatggaactgtactaaaaagtttatctcagccgggattgtcactgtgactgtgactgatctttttgtgacagttattccagttcgaggtggatctatgtc

SEQ ID NO: 23401 - DNA, 256 bp, Glycine max
  Clone ID: 701102265H1
agaatcgtaagctatgggaaagtcttacccaactgtgagtgctgattaccagaaggccgttgagaaggcgaagaagaagctcagaggcttcatcgctgagaagagatgcgctcctctaatgctccgtttggctggcactctgctggaacctttgacaagggcacgaagaccggtggacccttcggaaccatcaagcaccctgccgaactggctcacagcgctaacaacggtcttgacatcgctgttaggcttttgg

SEQ ID NO: 23402 - DNA, 264 bp, Glycine max
  Clone ID: 701102267H1
cccaattccaaattcaagaaattttttaaacttgacatatctgctatcaccttttccgcttcttgcgattcgacgatggccgatcaaaagctttcagaaccggcgcttaaacgtgagcagcttgatgaatcgtgagtagtctatattttgaacaacgaattcttgaactccgacttcttcaagacctcgagaacaatgatgaatgtaggaaaaatgggagcctgacaaggttaaatgaccagagtgatgtctgtggatttagaa

SEQ ID NO: 23403 - DNA, 264 bp, Glycine max
  Clone ID: 701102269H1
gaaaaagaaatgagattgaagattattgaagaagctgaggagtataaggtggctttctatgagaagaggaagcttaatgttgagactaacaaggttcagattagagaaagggagaagttattcgtggccatcaagagaagtttcacaaagaggcagacaaagcttattggaaaaccattgcagagctcattcctcgtgaggttcccaacattgaaaagaaaagaggcaaaaaggatcaggacaagaagccatcaattacggtca

SEQ ID NO: 23404 - DNA, 263 bp, Glycine max
  Clone ID: 701102270H1
gctcgagccgctcgagcggctcgagcaaatcctttgtggcaattgcatgactgggataagcattgcatggtggaagtggactcacaatgctcaccacatctcatgcaatagtcttgactatgatcctgattccagcacatacctgtctttgccgtgtcgacacggttcttcaattcaatcaaatcttgtttctatggaaggaaattggtgttcgattcattatcaaggtttctcatcagctaccagcacttcacattctaccc

SEQ ID NO: 23405 - DNA, 94 bp, Glycine max
  Clone ID: 701102271H1
ctcaacgcaaagagagaaaccacgacacaacacaaaacctccttagacttggtgtattttgtttttctgtctgtgttgttccttcacaaccaca

SEQ ID NO: 23406 - DNA, 261 bp, Glycine max
  Clone ID: 701102272H1
tgggatcaagaaagcgttggttttttacgctggaaaagcgcccaagggatagaaaactaactggatcatgcacgagtatcgtcttgcagacgtggatcgttccgttcgcaaaaagaacagcttaaggcggatgactgggtgctgtgccgaatttacaacaagaacaggtgcaattgaacagcaacaactaccaccaccgagtggggtccgcaaaattgaatgttccgaaatggaggacgagaagccggagattctgccgcc

SEQ ID NO: 23407 - DNA, 259 bp, Glycine max
  Clone ID: 701102273H1
caacaacacactagacaattttccaattcaattatcgattcccctactcacaaaaattaacatgcaatccatttctttgttcaattcctcaccaatattattccatccattttcaccatctaggccatgttctaatggcaagaaaatgaattcgtttgctccaactaaggcttccatgagaggatcagcggatcagaacttcagtggaaggttggtggatgagagcatgataatactgaggaagaggatccatgagatg

SEQ ID NO: 23408 - DNA, 254 bp, Glycine max
  Clone ID: 701102274H1
cgattgttctcctctttaatacatactgttctctcttcgatttgagggaacagtacaagagtctgagcatcggttaacccaactgcacaggtagtctccaaataatggagcctcatgatgagactgatgccaggctcctgaacgccccattctttgcattaataattgtggcttctttggaagagcagctaccatgaacatgtgttccaagtgttacaaggacatgctgttgaagcaggagcaggacaaatttg

SEQ ID NO: 23409 - DNA, 254 bp, Glycine max
  Clone ID: 701102275H1
aaggagtccttggccgtgggctgcgaactgttggtcttcggtcgagaattgatggagtttgccatttggaagtatagcatgatttgtcgtggttgggtgaagtgccaggagatgaaccaaccccgttgtttgtttggatctagtagtcttggttcgattgctattgttgctgggggaagtgataagtatggaaatgttctaaaatcagctgagttgtatgactcttcaacaggtatgtgggaacttttaccaaa

SEQ ID NO: 23410 - DNA, 255 bp, Glycine max
  Clone ID: 701102276H1
tctaacctcatcactcctcacacaacacacttgcctcttctacctccctccacttctagttcttcccacatggaggatttaatcatatctccttcttcgtcttcctctttggtctctctaccccagaaaacccaacaccaacaccaacccttctacaaaaactccaattcctcctccaaagccaacccgattggtgggtctacgccattttctggcaagcctcacacgacgacaatggcaacctctacttatcct

SEQ ID NO: 23411 - DNA, 247 bp, Glycine max
  Clone ID: 701102277H1
tcgagctcatcttcttctgaattctattgttgcagggtaacacatggctctgttattcaaggatccgtcgaagatttcggcgtatcgagatagaaggttccccgggacgcaagaggagttgagcacgcgcttctgacctcaaccaccgtttacgtggggaacatgtcgttttacacgacggaggagcaagtttacgagctcttctcgcgtgctggggaaatcaaaaagatcatcatgggcttggaca

SEQ ID NO: 23412 - DNA, 254 bp, Glycine max
  Clone ID: 701102278H1
gaatattgcttagttttgtcttatctgaatttggaaacagcttttgaatggctttttcaagagttgcactgctaatatgcacggtcgggtattttgtgattgcctctgccggcaatttccaccaaattttgatatcacatggggagatggtcgggctaagatactcaacaatggagagcttctcactctgtcacttgacaaagcctctggctcgggtttccaatccaagaacgaatacctttttggcaaaattg

SEQ ID NO: 23413 - DNA, 258 bp, Glycine max
  Clone ID: 701102279H1
ctcacatcctcttcttcatccctttgcatctccaattccgcttctctcagtttctccagaaacctctcacgccctttcttctcaaaaggtaactccttgtcgctaagcacagtactgaggcgcgcgctgtggtttgcgaggctgcgccgaagaagaaggtggattcggcggtaaagagagcgcgccaagccgagaagcaccgcgtttacaacaaagctcgcaaatcggagattaaaacacgtaccaagaaggttttgg

SEQ ID NO: 23414 - DNA, 258 bp, Glycine max
  Clone ID: 701102280H1
cggttgcagagatgagtggatgaattaattgatgtatgacattcaaatactaattgttgctatcacaattcacaagagattggattttggaatggaaagggtgttgtcagtagatgagatatcggagaatactgggtggctgcatcatcttcttcatcatcatcatcatcatcgttcaagtcaaagatgaaccggagcgaatccgaatgggcctttcagcagttcctacagcaggaagctgcttcttcttcatctaat

SEQ ID NO: 23415 - DNA, 250 bp, Glycine max
  Clone ID: 701102282H1
ggaagaggatgcggaaggagagaaggagaggcttttggagggtatggcggttttggattttgacatgctttgttcctctgtggcgttgcaaagttcgcatgggagttgggggaagcttgggggtggggatgtgatgaggagcaacaaggtggggttttgaggatgtgggagggtgaacttctcgattgctttgatgatcgccgaatcgcttttgaatcggcatgttgtcctcgttacggttttgggaaga

SEQ ID NO: 23416 - DNA, 264 bp, Glycine max
  Clone ID: 701102251H1
gttacagatgccgacaacgtcatcccaaaggctgtcgaagccttcaggagtgttgaaaaccttgaggggaacggtggccctggaaccatcaagaagatcactttcgttgaggatggagaaagcaagtttgtgtgcacaaaatagaatcagttgatgaggcaaacttgggatacagctataccgtagttggtggagttgggttgccagacacagtggagaagatcacattcgaatgcaaattggctgctggcgccaacggagggt

SEQ ID NO: 23417 - DNA, 268 bp, Glycine max
  Clone ID: 701102221H1
gaatctattgaatcaacaatcatgtcggacgaagagcaccatttcgagtccaaggccgacgccggagcctccaaaacctaccctcagcaagccggtaccatccgcacgaacggctacatcgtcatcaaaggccgccctgcaaggttgtggaagtttcgacttccaaaactggaaagcacggtcacgctaagtgtcactctgttggaattgatattttcactgccaagaaacttgaggatattgtgccctcttctcacaactgtgatgt

SEQ ID NO: 23418 - DNA, 264 bp, Glycine max
  Clone ID: 701102222H1
ctctcaccatggacgcgcaaccatcaaccccctcgactgccccgccgcctctgccgcaacacctcagctaccccgactccgtggcatcctcgcctcgctcccgcaacaccgactcctcgggacgagcccttcgcgcggcgctccaccaagctccgtctcatgtgcagctacggcgggcacatcgtcccccgcccccacgacaagtccctctgctacgtgggtggcgacacgcgcatcatcgtgtgcgaacgcgccacctcactc

SEQ ID NO: 23419 - DNA, 263 bp, Glycine max
  Clone ID: 701102223H1
gtggtgccttatcgctgtggttatcatcttcttcttcctctttcttagatctcttctttctctacgccgcacgccgaaaccatggccggaaaaggagaggtccctgctatcggaatcgatctcggaaccaccactcttgcgtcggtgtgtggcaacatgaccgcgttgaaatcatcgccactgaccaagggaacagaaccacgccgtcttacgtcggattcactgacaccgagcgtctcatcggtgatgcggccaagaatcaa

SEQ ID NO: 23420 - DNA, 254 bp, Glycine max
  Clone ID: 701102224H1
ttttgttctcattctgtgactctgtgcttagttaacgttaacactgacttaagatggcggattctgcagatgtcccccacgatgttgtgtccctcctctcttctcctcaaagggactttcttcttcgaaacacggcgatcacgttaaaattgacagcttgaagggtaagaaacttggtttgtatttttcggcatcctggtgtggtccatgtcaaacatttacgccaactttggtggatgtgtacaatgaggttg

SEQ ID NO: 23421 - DNA, 259 bp, Glycine max
  Clone ID: 701102225H1
cctcagccgaatcggctcgagggcagatcttgtggcgggtgaaaacgctgttttacctccacagtttgtgaaacaaaccgacaatagaggcctattgtctagttggtcgctcccaggagcaagtgttggctacccttcagttcggggatttttgacacacagtggttggaattcaacgttggaaagtatgtgtggaggtgttccaatgatttggtggcctttctttgcagagcaacagaccaattgtcggttttgttgc

SEQ ID NO: 23422 - DNA, 258 bp, Glycine max
  Clone ID: 701102227H1
ggccaacaaggattggtcctttggtttcaactacactgattggtggtctagattcggaaatcatcctcagaacaaaacacagcaacaacccaagcaaattgtcgtgggtggttctgagcattggcactaggattcaactacaccgattgggcattcaagagtgccccattttacctcaatgatactctagttttcaaatatgatgctccaaatgccaccagtttcccacacagtgtgtacatgttcacagttttggga

SEQ ID NO: 23423 - DNA, 260 bp, Glycine max
  Clone ID: 701102228H1
ctcctccaccgtggctccggcaacactctacaaagctctgacaaacagatgctgacactatcatcccaaagattattggggccatccaaactattgaaatcgttgaaggaaatggaggacccggaaccgtcaagaagataacagctagtgaaggtgaccaaaccagtttcgtgctgcaaaaagtggccgcaattgacgaggctaacttggtatacgactacagcatagtgggagggacggggttgcatgaaagtttggag

SEQ ID NO: 23424 - DNA, 258 bp, Glycine max
  Clone ID: 701102229H1
cagtcaaacactctgtaactctttattttattttctttctttctttctccgatcgcatagctcgctcgcaaccaccatgccttcccgaagaagaactctcttgaaggtcatcattctcggtgacagtgggtggggaagacatctttgatgaaccaatatgtgaataagaagtttagtaatcagtacaaggcaaccattggagcggattttttaaccaaagaagtgcaattcgaagataggcttttcaccttacagatt

SEQ ID NO: 23425 - DNA, 259 bp, Glycine max
  Clone ID: 701102230H1
aatctccatctaatagtgttaatttgtctttctctatctctatcggtcatgggtgcttttgcttttgatgaggaaaactcctccaccgtggctccggcaacactctacaaagctctgacaaaagatgctgacactatcatcccaaagattattggggccatccaaactattgaaatcgttgaacgaaatggaggacccggaaccgtcaagaagataacagctagtgaaggtgaccaaaccagtttcgtgctgcaaaaag

SEQ ID NO: 23426 - DNA, 261 bp, Glycine max
  Clone ID: 701102231H1
caacaattgcatgtgtcataagtgtagatctctaactaacattttatgtctagtcgagtcttgcttttgattaactcctgcatagatgtttctacccaaaaatgaaaaaaaaaagaagcttttataggttttggtttctcagtccaggtcacttttgtttctggtcgtttttttaatttctcaatttcaaaaaaatactctttttagtcccttctgactgattttcagcagtttggattcataattatagcagatgcactg

SEQ ID NO: 23427 - DNA, 264 bp, Glycine max
  Clone ID: 701102232H1
gatggatgccactacccccaagtactctaaggctaggtatgatgaaatcgtgaaggaagtctcttcttacttgaagaaggttggttacaacccagacaagattccctttgttcccatctctggttttgaggggacaacatgattgagaggtccaccaaccttgactggtacaagggaccaactctccttgaggctcttgaccaaatcaatgagcccaagaggccctccgacaagcctctaaggcttccattgcaggatgtctac

SEQ ID NO: 23428 - DNA, 260 bp, Glycine max
  Clone ID: 701102235H1
ctcgagccgcatatctactccatttcaccctgcctatatcaccgcagaaagaattaagaaagccaaaaatttggagctgcttttgactgctggcattggttctgatcacgttgatctcaaggcagcagctgctctggtttaactgtggcagagatcacaggaagcaacgtagtctcggtcgcggaggatgaactcctcagaatccttgttctggtgaggaatttcttgccagggtaccatcaggctgttaatggggaatg

SEQ ID NO: 23429 - DNA, 239 bp, Glycine max
  Clone ID: 701102236H1
agattttataacatgaaattgattctttctagattgtcctaattttaattgtacattccggagaagaggcagagcataaacgcatgcattcatacaaagaagaaataaaaaataaaaacacaaaggaatgcgttttgtttcaaaaaaaaaaaaaaaaaaaaaaaaaaaaaaaaaaaaaaaacaaaaaaaaaaaaaaaaaaaaaaaaaaaaaaaaaaaaagaaaaaaaaaaagggggggc

SEQ ID NO: 23430 - DNA, 265 bp, Glycine max
  Clone ID: 701102237H1
cgttgttgttttcagataaacacgtgactcactatctatctatcaatcgatatctccgagttcagccgaaccaaactccgaagctatggcagagctccaaaccaaggttgaacctgttacggtcccggctccgtggatcccgagccaccgctagctgaggctccgccgctcgagaagaaagcggtggcggtgccaccacctgttccggctgcggcagaggaaaccaaagctcttgttattgtggagaaggagaaggagaatgaga

SEQ ID NO: 23431 - DNA, 265 bp, Glycine max
  Clone ID: 701102238H1
cctcgagccgattcggctcgaggtttctatggcttctgaagtaatacagtaccgatgctttgccggtgggcttgcttgggccaccgacagcgatgctctcgagaaagccttctctcattatggtgagatcgtcgaatcgaaggttatcatcgatcgtgaaactggaagatcgagagggtttggatttgtgaccttcgcctcggaccaggcgatgaaagacgcaatcgaaggaatgaacggtcagaacctcgacggtcgtagtatc

SEQ ID NO: 23432 - DNA, 262 bp, Glycine max
  Clone ID: 701102240H1
ctgccagtagtcatatgcttgtctcaaagattaagccatgcatgtgtaagtatgaactaattcagactgtgaaactgcgaatggctcattaaatcagttatagtttgtttgatggtatctactcggataacgtagtaattctagagctaatacgtgcaacaaaccccgacttctggaagggatgcatttattagataaaaggtcaacacaggctctgcctgttgctttgatgattcatgataactcgtcggatcgcacggcc

SEQ ID NO: 23433 - DNA, 257 bp, Glycine max
  Clone ID: 701102241H1
gttcctccttttttttatggtgctaagaaaacccaatcaacagatcaagttcctatcttttatggtgctaagaaaactcaatcaacagatcaagttcctatcttttatggtgctaagaaaatccaatcacagatcatactcctcttttgtaatatggtgctaagaaaaccgaatccgtagatcgagttcctattcagtggtacggtattaagataactcaatccgaagatcaacctcctctgtggtacggtgttaag

SEQ ID NO: 23434 - DNA, 258 bp, Glycine max
  Clone ID: 701102242H1
gtgatttggagtttggagcgactgaactaatcattaatttgcactcgctgtttcagcttcatcacccttcttttgcatcatttatatctcttgagaaatggcacaagaaacctttctattcacatctaatctgtaaacgagggtcaccccgacaagctgtgcgatcagatctctgatgcagtacttgatgcgtgccttgaacaggaccctgacagcaaggttgcctgtcagacatgcaccaagaccaacatggtcatg

SEQ ID NO: 23435 - DNA, 257 bp, Glycine max
  Clone ID: 701102243H1
ctcgagccgctttgagaagtccaatgtggtatctccatttgcaatgcatcaacagcagctggccatgctggcacagcaacagtctcttctaatggctgccgctaaatctgctggtggggatcccaagacctggccagcttacaacaacaacagtctcttctaatggctgctgctgctgctaaatctggtggcacggattccaagtacctggccagcatacaagaacctgggtccaacattcctctccaaagttggct

SEQ ID NO: 23436 - DNA, 255 bp, Glycine max
  Clone ID: 701102244H1
caaaatgtaagagagagaaaagacaagaagaaggacagccccaacccgataatcatactcgtacttgagatgatattggataatctcaacctcaattttcctcaatacacaatcaccttcacttttttctctcctcttcatttctgaactcatccccatggatccctttgatttgatacgcgaagggtttggttgaggctgactagacatgtgctggtactacttttaaagtctgtttatgctgtagtagttatt

SEQ ID NO: 23437 - DNA, 257 bp, Glycine max
  Clone ID: 701102245H1
cgaaaccaccgaacttgttcacgagaacaggaatggcacctatcagtggattgtcaaacccaaatctgtcaaatacgaatttaaaaccaacatccatgttcctaaattaggggtaatgcttgtgcggtggggtggaaacaacggctcaaccctcaccggtggtgttattgctaaccgagagggcatttcatgggctacaaaggacaagattcaacaagccaattactttggctccctcacccaagcctcagctatcc

SEQ ID NO: 23438 - DNA, 258 bp, Glycine max
  Clone ID: 701102247H1
ggcactccaaattatgttgctcctgaggtccttaacgatagaggctatgatggggcaactgcagacttgtggtcatgtggggttattctctttgtattggttgcaggttacttgcctttcgacgacccaatcttatgaacctgtataaaaagatctcagctgctgaatttacttgccccccatggctttctttcactgccaggaaattgattacacgaatcttggatccagatcccaccactcgtatcactatacctg

SEQ ID NO: 23439 - DNA, 241 bp, Glycine max
  Clone ID: 701102248H1
aaacaaattactctcttcttctgcactttacttttccccttcactcctcttccgttttctctcactaacctcatttctccgtctgcaaaccctaaagcccattcattttgttcgccggcgactaatttacggcccggtccggctcgaaatattcgacccgaaccgcgcgtggttacctgttctctctggagagagcgagaccagggcgtggtggtggaaatgtagaaccaccagcttcaag

SEQ ID NO: 23440 - DNA, 228 bp, Glycine max
  Clone ID: 701102250H1
gggaatgtccctaaaagcagaatttttttcattgcgtggtcccctgacacatcaagggtgaggagcaagatgatttatgcaagctccaaagacagattcaagagggagctggatggaattcaagtagagttgcagcaactgatcctactgagatgggtcttgatgtgttcaaaagccgtgccaactagaatgattatataaactagtaggctttctggtggggagcag

SEQ ID NO: 23441 - DNA, 264 bp, Glycine max
  Clone ID: 701102220H1
ctcgagccgcgcgtcgctccgcaccagtttcaccgcacgaatatcttgttgtttggagcgacccgagaaaaactctgtaaacatgttggtttaccaggacctccttacaggtgatgagcttctctctgactcctccgttacaaggaaattgagaatggaatgctgtgggaagttgaggggaagtgggttgttaaaggagcagttgatgtagacattggtgcaaacccttctgctgagggtggaggagaagatgagggagttgat

SEQ ID NO: 23442 - DNA, 265 bp, Glycine max
  Clone ID: 701102187H1
cggctctgatgctcggtgtcgccgtcgtttgcctccacggcgcgttccgcgtgccggaggatctgttcctcgacgatcaggagaattctcaggctaccggattcctctccttcctcaccggccctgcctccgccgctgccgccgccgccgccgccgccgccgcttttcccagcgttgcctcacgcgtttaggtaagaaataaaaaatctcagtgagatcgtcagatctggtgctgtttctccccgatctgatgagttttgacgcc

SEQ ID NO: 23443 - DNA, 262 bp, Glycine max
  Clone ID: 701102188H1
cgttattctcttattcatccttctcttctgaataatccagatctctttctgcccttttctccgtcacgcttttcgtgaccggatctgtatggatttgatccagatctacacgccgatggtggttttggccgggtctttcatagatctggtgcgtagaggctcagatctacggtaccgaggtacaacagagaatcgatgacaagaacgcagatccgacggtagatccagccgattccgcttgttcgatcgctacagacccctg

SEQ ID NO: 23444 - DNA, 262 bp, Glycine max
  Clone ID: 701102189H1
aaaacactctgacacaacaaacacaaacacaatcgtcaattaaaacaacaacaatatcgaagctgcacaaattaatatccaacactctcaagctttcgagtttcaaactctgggcgctgaatttggttcatttttctaagagttatatatacttttattgaaattgttgcggttcaagtctgaactaaaacattaagtttgcggaggctggtgcttttctgatttgccagtcaaattattaaatcacttgttcacatagatc

SEQ ID NO: 23445 - DNA, 262 bp, Glycine max
  Clone ID: 701102190H1
gaaaaagagggagagtataataagtactgctcttgttacctctcgtagctctctggatcaaacatggatgctgacagccttcttgcaaggtgaatccatggcacaaagaacccaactagcacccgatcaagtgaatgaaattaaggcagaatacagatttcccctcttgtggagctcattcaaagaacggagcatcttgaaaaaggatttcagacagctcttttccctcttgtagaggactcagaaaggaaatcctggccga

SEQ ID NO: 23446 - DNA, 260 bp, Glycine max
  Clone ID: 701102191H1
aaaaaagtgtgaagtgcagagggatcattgacctgctgcgacgaacacgacgtcgtttttgtttccctctgtgagtgatgggattcttcaaaagggtagctggatttcttgggtttggaaaccacaaacacgattccaaggatgagaccgacgacggtcaacctcgagtgagagaaaccgtcgtcgatcgcccccacctcgctcccgttctcactccctctacttccggcgacggcggaattcagggtctggattggtat

SEQ ID NO: 23447 - DNA, 125 bp, Glycine max
  Clone ID: 701102192H1
tttctttctttctcccctgtcgatccgagttagcattccaaggagcgagtaagtgactcggtggtacaggcggcgttttctcgtttcgccgcgcatcattcgatttcgctccgttccacacaaca

SEQ ID NO: 23448 - DNA, 261 bp, Glycine max
  Clone ID: 701102193H1
gactcgagcgaatcggctgacggctcgaggaagaaattcgcattcttcagtcttcgatttcaagatgattaggtctactgttgagaagattgaaaagggtctctcactaattgtgcccaaaaagcctgaactcagctacttcaatgaaaatcaagtggaaaccacaacaaatgttgtgccagatgatgttagtaagggatattttgcagttgttgcaatcaaagatggagaaatcaaaaggtttgttgttgagttagacta

SEQ ID NO: 23449 - DNA, 261 bp, Glycine max
  Clone ID: 701102194H1
gcactctccttccaagcaatactttctcttttagctaagtctagttcattgatcctcgttgccgagttactttaaaagaagtggaagaatattgtttcttggagtataaaacccgaacaatatatgcatatattagtggcgtgcttgtagttacgaacggaattgttatttatctgttctttctattcgttcctacagtgcgtttgctcaacacttttgttctcagcacctatctctttaagagtttacacttgaataaac

SEQ ID NO: 23450 - DNA, 266 bp, Glycine max
  Clone ID: 701102195H1
gcagaaggagcaaaagcaatggcgccgaagaagccgagaaccacgacaaggaaccctgatttggttagggggattggcaagtattcgaggtcgcagatgtaccacaagacgggcatctgggccatcaaggccaaaaaccgtggcgttttgccccgccacgatcccaagcccaagcccgaggccccggcccagaagccgcccaagttctaccccgcggacgatgttaagaagcccctcgtcaacaagcacaagcccaaacccgcgaa

SEQ ID NO: 23451 - DNA, 151 bp, Glycine max
  Clone ID: 701102201H1
ctctctactactgctagctgtgacttgttttgagttcaatcaaatcgcattggtatctgaaatcaggaaagatggttagcgtagctgagatcaggcaggcacaaagggcagaaggcccagcaaccatccttgccattgaattgaaaaccca

SEQ ID NO: 23452 - DNA, 260 bp, Glycine max
  Clone ID: 701102203H1
ggagagcgcaccatggccttcaatttcagctgctgcaaaagatttgatcaggaaaatgttgaataatgaccctaagaaacgcattacagctgccgaagcccttgaacacccgtggatgaaggaaggtggtgaagctctgacaagcctttagacaatgctgttttgactagaatgaaacagttcagagcaatgaacaagatgaagacacttgctttaaaggttatagcagaaaacctttcagaggaagaaataaagggttt

SEQ ID NO: 23453 - DNA, 241 bp, Glycine max
  Clone ID: 701102204H1
cctcgagccgctcgagccgctcgagcggtgagttgaatctcaaacttctaagagagatttcgctgctctctgaagaagggtgtttgcttgactttggagatgtcgctgctctcagatctcatcaaccttaacctctcagacactactgagaaggtgatcgcagagtacatatggatcggtggttcaggaatggacctgaggagcaaagcaaggactctcccaggaccagttagcgaccttc

SEQ ID NO: 23454 - DNA, 263 bp, Glycine max
  Clone ID: 701102205H1
cgaagtcctaaatttcctggagttccctatactttcttctcacagaggcaaggatgtaaggtatctctgtaccaagatgctcatgtgcctgataattttgtacctaaaatacctcttgctggaggcaagaattagaggctcataggtgttgggaggatatatttgatgcaatcactgatgctaaacacttcatatacattactggttggtctgtttatactgaaatctccttggtaagggcttctaggaggcctaagcctggg

SEQ ID NO: 23455 - DNA, 268 bp, Glycine max
  Clone ID: 701102206H1
gatggctaatccctcactcttgttcttcagtctcctcctattatccgccaccgtagccgccgccgaacggatcgacgatgaagacgaccttctgatccgtcaagtggtgccggatgcggaggaccaccacctgctcaacgcggagcaccacttctccgccttcaagacaaagttcggcaagacctacgccacgcaggaggagcacgaccaccgcttccgtatcttcaagaacaacttgctccgcgccaagtcacaccagaaattggat

SEQ ID NO: 23456 - DNA, 265 bp, Glycine max
  Clone ID: 701102207H1
atcaaaacaaccttctttctttcaggttcttgatcagtgtcaaaaccaaaagggtggttgcaaattgcaatggctaagcatgatgttgagggtggttccttcgctgcaaaggactaccatgatcctcctccagaccattgattgatgctgaggaactcacacagtggtccttctacagggctttgattgctgagttcattgccacaatgctcttcctttacatcacagtgctcactgtgattggttacaagagccagagtgatgt

SEQ ID NO: 23457 - DNA, 249 bp, Glycine max
  Clone ID: 701102208H1
gaggattttgacaatgccttgttggattttctggtgaatgaattcaaaagaactgagagtattgaccttgcaaaggacaggcttgcactgcagaagcttcgtgaagctgctgagaaagctaagatcgagctgcttcaacatctcaaactgagatcaacctgcctttcatcactgctgatgcatctggtgcaaagcatctgaacataacattgacaagatcgaagtttgaggctttggtgaatcacttga

SEQ ID NO: 23458 - DNA, 265 bp, Glycine max
  Clone ID: 701102209H1
aaaaccggtgcgaatgcctccatttagaactcctcaggctaacagctcaggctcaggctctaaatatccgagaccaagggatgtagggtccaattcaccctttgatttgccattgaaggatgatgacagcctcacaagctgcccaccattttcagtgccaaactacatggctccaaccctttcagcccgggccaaagcacgtgctagtagtaatcctagagaaaggcttggtggaactccaactagtactgattcaaagaggagg

SEQ ID NO: 23459 - DNA, 261 bp, Glycine max
  Clone ID: 701102210H1
taaagacttgcttccaagatggttctgctagagaagctctgggatgacgttgttgctggccctcaacctgagcgtggccttggcaagctcagaaaactcaccaccctcaaaactattgatgaaggagacatagcaagctgcagaagacgttgtcgatgccgtcgacaccgacaaccccgatgactcccacgactccaacgacaccgggatccgcgcgtaaagctgacaacgtttggaggagcgtcttccatcctgggagca

SEQ ID NO: 23460 - DNA, 259 bp, Glycine max
  Clone ID: 701102211H1
cttctctctaatttcatttccttgattatagctttcaattaatgcgcttctacgctgaagatcctctctcaggcttgacaataggccaggccatatatgaggtagctctcatgattgcagttctgagatggtcttgtgcttgatcttcagagtgatcaacgacagaagaacaacacaatccgacgagaccccaacaccagaaccatgttctcagatgacaagggacaaggacagcattcttttgctgacgactttcgga

SEQ ID NO: 23461 - DNA, 175 bp, Glycine max
  Clone ID: 701102213H1
ctcgagccgaacaaacaccaccacccattgatcggtttttgcttcatccaaactcaatgggcgccgacgaagactacgattacttgttcaagctggtcctcatcggagattcgggtgttggcaagtccacctcttgtcccgattcacccgaaacgagttcagcttggagaccaaa

SEQ ID NO: 23462 - DNA, 233 bp, Glycine max
  Clone ID: 701102214H1
atcttattgtgttcaagtgacagacaaatcagaacagggaagagagatttgaaatgtaaatgccaagtgaaagtgaaaagtacagtccagttttagtgatctctttaatttatttgttcatagattaattgatggtgtatgattgctctttctatttattgtggcatttttgtgttgtaccctgttgttgtgtttgcaataagtattagtaataaagcagcaaattcaatttc

SEQ ID NO: 23463 - DNA, 261 bp, Glycine max
  Clone ID: 701102216H1
cctctctcaaattccccattctaaaaccgtcgcctcgtgtacgagtttccactcacaacccccaacaaagagaacaacaacaaccctatactctctcgacctcgtattctcctccgtgtctccctcctcatttttttcttttccgttcacgaaatcgatggattttctggtgggtcccactttcaccatcgacgtcgcctcctccccgcctccgtacgacgccgacctccccggtgtcgccaccgccgccgaccgaccgta

SEQ ID NO: 23464 - DNA, 283 bp, Glycine max
  Clone ID: 701102217H1
gcattcggctcgaggcagcactgtccccagaagatctcacagatgctgagtggtattacttggtttgcatgtccttcatattcaacattggccaagggttaccaggcagaactctagcaaagggtcaacccatttagctgaacaatgcccatcttctgattgtaaaatttttagccgttctcttctggcaaagagtgcatccattgagacggttgtgtgctttccgtttagggaaggggttattgagttaggtactactgaacaggtcccaaagatttgagtg

SEQ ID NO: 23465 - DNA, 206 bp, Glycine max
  Clone ID: 701102218H1
ggaaagccggcacatgcagatttcgggcacttctatggatccagttatgtttcagcacctgatgcatcgtgcacgccatctctatcccgcaatagggacggcttgttagtaacagacatggatcttaacctgtgcaggcaggtgaaagacaagtggggtttcagaatgacttcacggtacgagttatatgccgacacactcggccg

SEQ ID NO: 23466 - DNA, 267 bp, Glycine max
  Clone ID: 701102219H1
ggccacttttctgtttctctacatcaccgtcttaaccgttatgggagtcgccggggctaagtctaagtgtagtaccgttgggattcaaggaatcgcttgggccttcggtggcatgatcttcgccctcgtttactcaccgctggcatctcagggggacacataaacccggcggtgacatttgggctgtttttggcgaggaagttgtcgttgcccagggcgattttctacatcgtgatgcaatgcttgggtgctatttgtggcgctggc

SEQ ID NO: 23467 - DNA, 259 bp, Glycine max
  Clone ID: 701102186H1
gttttctcatcatcatcgactttctctcttatgcaaggcaggttctccttctccgatttcaatttgattgaacgagtagtgttaagattatgatattttttgagaagcttcgtttctctcctcacctaagccgcttcattgccggcatcatcttgttaattttctgcaattcattccagttagtccccaatttccccattcctatacatccttagattctacgtcgttaactctctccgatttgattctatattcgata

SEQ ID NO: 23468 - DNA, 262 bp, Glycine max
  Clone ID: 701102158H1
tgaagtgttcggattgcggcggaggagaagaaggttgttccggcgaaggggaagcactaccgcggcgtgcggcagcggccgtgggggaagttcgcggcggagatccgcgacccggcgaagaacggagcaagggtttggctggggacgtttgacacggcggaggacgcggcgttggcgtacgaccgcgccgcctaccgggtggggacggtgcaagagcaagtggggagtcaagtggcagagtgtacacgtggcgagcagttat

SEQ ID NO: 23469 - DNA, 266 bp, Glycine max
  Clone ID: 701102159H1
acttccctttgttctcaaaccttatcccttatcctcccaaaaccaaaccatgtctacctccgcagcttctctcgcactcccaaccctcactctccgaactcgacaacctctctgttctccccaatgcttctcctcgtccctctccctcacccctaactccaaacccatttccatttccgccgttttcctcaaaacaacgctgtcgtcgtcgtcgccgttgtcgctgtcgtctcgcttcgttccccatgtctctgtgttggagcagg

SEQ ID NO: 23470 - DNA, 251 bp, Glycine max
  Clone ID: 701102160H1
cggctcgacggacaagacaggagcgacgattatcctctttccattcgtcgttcaccttcacttctcgtacgcttatttcgtagttgtttattattgtagtgtattcttctcttctgggtctgggtggctgttgacagattatagattagatgatgtgatgtgaaagcactgcatgagtagtttttttggattgatttgtttgtgaggtgagcgcaacagagagacagagagcgagagagcagagcagaggg

SEQ ID NO: 23471 - DNA, 265 bp, Glycine max
  Clone ID: 701102161H1
gaccaaatggtagtattgatcgctataaggctcacttggtggacaaaggatacactcagatttttggccctgactacagggacaccttttccccaatggccacaattgctcatgtccatcctcttcttgctatggctgccattcaacattggtctcttcaccagctaggcataaaaaatgccttcttgcatggtgagttgcaagaattttatatgtctcaaactccaggttttatagtttcaggtgactctcggttaatttgttg

SEQ ID NO: 23472 - DNA, 279 bp, Glycine max
  Clone ID: 701102162H1
cggcattcggctcgactcgagcgaatcggctcagaaaaaaagggggggaaatttcaacggcgtcaagggtttctctgaaggcgaagggtaagagttcaaagggatcgaaggccgcggaagatcgatctgcgagcgagtgcctgaaggagtggacgacatgggcaatgcgaaaagcgaaggtcatcactcactatggtttcatccctttggtcatcatcatcggtatgaactctgaccccaagcccccactttcccagcttctcagccccgtctgatcta

SEQ ID NO: 23473 - DNA, 267 bp, Glycine max
  Clone ID: 701102163H1
gggaatcttcttccatggcctccaagcggattctgaaggagcttaaggacctccagaaagactctccaacctcttgcagcgccggtcctgtagcggaagatatgtttcattggcaagcgactataatgggtccccctgatagcccttatgctgggggtgtttttctagttactattcattttcctccggattatccattcaagccacccaaggttgcatttaggactaaagttttccacccaaatatcaacagcaatggtagtattt

SEQ ID NO: 23474 - DNA, 269 bp, Glycine max
  Clone ID: 701102164H1
ctataataaagccatggaagctcaaacctggttcttggttattgccttattcctcttccttctactcaatcggcttgcaaaatatctcaagccaaaacctaatgctggtcacaaacttccccctggtccaaaaaagctacctctcgtaggaaacatgcatcaactagcagcagcaggtccactcccacatcgtgcactccgagaacttgctcataaatatggacctctgatgcacctccaacttggtgagatttctgcagtggtagtat

SEQ ID NO: 23475 - DNA, 270 bp, Glycine max
  Clone ID: 701102165H1
ttcggctcgagtctcatcccagtttcactttctcattattttctctcctattgataaagaaacagagagagagagcaaaaaatgcctgcggtacgaggtattagcaacggagggggcaatgagtaccctggaagcctcactccttttgtgacggtaacatgtatacttgcagccatgggtgggttactcttcggttacgatatcggaatttcaggtggggtgacatccatggatccgtttctgctcaagtttttcccgtcggtgttccgg

SEQ ID NO: 23476 - DNA, 273 bp, Glycine max
  Clone ID: 701102166H1
acaaaagttggtagcttccttccttcttcaaacgcaacgaagtttctttccactttcaaaattcccaaccgcccctttgttctctccgtacaacatcatcacccctgattctgggtcatttaaatccccgaatttcatcattcgttattttcatcgtttttttgcctcttatttcatccaattctcgctttttcaacgatcacagtgttgacccttgatgggtttttctcgtcgatcataagcatacccgggtttgtgaaaaaggtttctcct

SEQ ID NO: 23477 - DNA, 271 bp, Glycine max
  Clone ID: 701102167H1
atcgatgttccttcattctttctctgccccatttcgttagaaatcatgaaggatccagtgacggtctcaacaggcatcacctacgaccgtgaaagcatcgaaacatggctgttctcgaagaaaaacacgacatgccccatgaccaaacagcccttgatagattacaccgatctcacaccaaaccacacccttcggagactcatccaagcgtggtgtaccatgaacacttctcacggcatcgaaaggatcccaacccccaaaccccccatta

SEQ ID NO: 23478 - DNA, 268 bp, Glycine max
  Clone ID: 701102168H1
cctcgagccgattcggctcgagaacacaaaaaaatgaaacctacactcaccattctcttgacgtctctactacttctcatcacttcaccctccttggcaacccgacccgcatccaaccctgatcaagtcaagcacaacaaaaacaacaaccaaggtggtggtgctggtgctggtgctggcgggttctttggccctggaggagggttcagcatacccggttttggaaacgggtttggaaatggcatcataggaggaggatacggatccg

SEQ ID NO: 23479 - DNA, 266 bp, Glycine max
  Clone ID: 701102169H1
ctttgtgtataactgtgcagtgatgggatgctgaggcatttgcacttggtgaatagtgctatatggatttattctgaatggaattaacattcttcactttcaaggagagatgattctggctcttgggtaatcagcccacctttgggggtaaatatttactcctatttagagtaacagatacagttttagaaggttcacaaaactgagtcttttcattttaagttatcatgatggtttttcaaatgttggcacagtgacaggtgaat

SEQ ID NO: 23480 - DNA, 266 bp, Glycine max
  Clone ID: 701102170H1
ggattccttgtcatgacaaagaaattacgtttgggttgttctttgcagggggaggaggatggaaagaaagtgaataaccttctggaaatgaatagaggggaaggagcgaatgatggtttttctggacctggaccaaatgattcgcttcttcctggtcttattgatgatgttgccttgaattgtcttgcttggcttagtggatccgattatgccgcactatcgtgtatcaataaaaagttcaataaactgatcaatagtgggtatct

SEQ ID NO: 23481 - DNA, 256 bp, Glycine max
  Clone ID: 701102173H1
agaaaaatgagaagaagcatgttgatgttactactatgcttcctattgggcaaatttacgtaagggggctcattttacaaagtatttacgggatggggtctgtttcaaaagaaataacggagggggtttgttttgtggaggaaaccgccattgccactggcggcctggctcaacccgccattgccagtggcggcaaaggtggagagaagggtgtattgtcactagcagcggcgatatggccacgtaggatggagag

SEQ ID NO: 23482 - DNA, 264 bp, Glycine max
  Clone ID: 701102174H1
ctgggagatgccgttgctttaatcaaaggggtgggaaagaatttgcggaggaaagaaaggagggtacggatagagcagattagagctagtcttggcttgtcagattcacagagaacaccctcgccaggagaatccttgaaggatttctacaggcgtacaaatatgtattggcaaatggcagcccatgaacatactcaacacactggaaaagaactccgcaaggatggttttgatcttgctgaagctcggtacagggagctaaaa

SEQ ID NO: 23483 - DNA, 264 bp, Glycine max
  Clone ID: 701102175H1
ggcaagaatatcaaattggtctcttgtcttcctcctcatctctacactactccacatacagcccagcctctcaagcccaagcccaagcccaagcccaagcccgttcataaaatcctcctgcagcagcacccagtacccagccctctgcgtctcatccctctccgtctacgcctccagcatccaacaggaccctcaccaactggttcagacagcactctccctctccctgaaccgcacccaagccaccaaaaccttcggtggcta

SEQ ID NO: 23484 - DNA, 261 bp, Glycine max
  Clone ID: 701102177H1
cggctcgagtttacagagaagctaagaggcgcacgtcagcaaaagctcgtggaattgctagcaatggcgaggatcaaggtttacgagctgaggcagaagacgaaggctgatctgctgaatcaactgaaggacctgaaggcggagttgccttgcttcgtgttgctaaggtcaccggtggtgcccctaacaagctttccaagataaaggtggtgaggttgaacattgcccaggttttgacggtgatttctcagaagcagaagg

SEQ ID NO: 23485 - DNA, 261 bp, Glycine max
  Clone ID: 701102178H1
acgaggtggaactgaagctctcatcggcacgcgctctcaagaacgtgaactggcgccatggcccgaaccgcccatacgtcgtcgtttgggtcgacccaagcaacaagctctcgacgcgcgtggacgaaagcggcgacactgacgcgaattgggaccaaacgctcacaattccgttgccaccaaagcctctcgaggatcaaacgttgtcactcgacgtggtccacgccggctcggaggaggacaccaagccgcttatcggct

SEQ ID NO: 23486 - DNA, 264 bp, Glycine max
  Clone ID: 701102180H1
atagggccctaaaaagaacaaaagtagttatacactatgtcttcatttgtattatatgtgatgatatggattgttcatggaacttgtttagctgactgaattattttaatttagaatagctgaccgattttctttttctcacaggataatgtgcgaaatcagcttattcagtttgagcttttactcacaactgcaacatttgtggttgccatctttggagtggtagcaggaatatttgggatgaattttgaaattcaattattc

SEQ ID NO: 23487 - DNA, 266 bp, Glycine max
  Clone ID: 701102181H1
cgtcatttcatttccaccaaacaccacacccccacgtgaagtcaaatggtccttagttctgggagtgttgatgactcagtcttgccggaacgaacggaaaaggggatctcaatggacaacaccaagccccttatcgaactggaactcgacgatgatggcagaatcacaggtgcaggacatgcacgggaagatagcatgcacatcaggacaggggttttaggggcgggggtgctgtcttttgcattcgttatggccacactaggatg

SEQ ID NO: 23488 - DNA, 266 bp, Glycine max
  Clone ID: 701102182H1
ctcgagccggactaattgggttaggaacttattgctgacaggatcgcctcttttgtggcaccctattccttatgttctgtttccttaacacagttgcgattgcttatagtgcaactgctgccctgccatttggcacaattgtggtgattgtcctaatatggacattggtaacttcaccattgcttgtgttgggtggtattgctggtaaaaatagcaaaactgagttccaagcacctgtccgcactacaaactatccccgagagatt

SEQ ID NO: 23489 - DNA, 267 bp, Glycine max
  Clone ID: 701102183H1
cggctcgagaaacaatgcgcttgtgggaagttttatggacacattatccgtctgagcatctgcacctgtatgtatgtgtggcaatcttgaaacgatatcgtggtaaaataattggagaggaaatggacttcgacacccttttgaagtttattaatgagctaagtggtcacatcaaccttgatgcaaccctcagagatgcagaggctctatgcatatgtgctggtgagaacggtgctgctcgcatacctcccggaaccccaccatcgt

SEQ ID NO: 23490 - DNA, 267 bp, Glycine max
  Clone ID: 701102184H1
ggaagatacactggcaatgagaaaagagattcaagatcttaggacaaatgctcgaatttttcagcttagcaagtgcactgcatgcaccttcacccttgatttgcctgccgtgcacttcatgtgcatgcactcattccacctgcgctgccttggtgataatgaaaaagaatgccctcagtgtgcacctgaatataggtctgtcttagaaatgaaaaacaatttagagcaaaattctaaggatcaggacagattttttcagcaggtgaa

SEQ ID NO: 23491 - DNA, 262 bp, Glycine max
  Clone ID: 701102157H1
ggaagttttgccgtttgaatctatagaatagaatcaaaccaaattgaaagaagatcgatcgatcgatcgatggctctggtcggagttgaagtgaagcatgccgcggagcccgcaccggaggagaattgctccgccaagcccaccaagcagggcgagggcctccgccactactattctcccaacatccacgagcatcagctccttctccgtcaaaagacgcataacctcaaccgtcttgaggctcagagaaacgagctcaatt

SEQ ID NO: 23492 - DNA, 155 bp, Glycine max
  Clone ID: 701102130H1
aaaattaatcatcttacttatttattctccgaaaatggttgatttacattggaaatcaaagatgccaagttccgacatgccttccaaaactctaaaactctctctctccgacaacaagtccttaccctctttgcaactacccttccgcaccacag

SEQ ID NO: 23493 - DNA, 266 bp, Glycine max
  Clone ID: 701102131H1
cggctcgagttcagatgctcctccagtgagttgcatagtttctgatggtgtcatgaccttcactcttgatgctgctgaagaattgggtgtccccgaggtgctgttttggaccactagtgcatgtggatttatgtgttacgtgcaataccaacaactcattgaaaaggacctaacacctctcaaagactctagttatatcacaaatggttatttggagactaccatcgattggataccaggcattaaggaaattcgattgaaggata

SEQ ID NO: 23494 - DNA, 267 bp, Glycine max
  Clone ID: 701102132H1
ctcagatatcggctgaggagcaggatgaaatgatgacgaacttggagcgccgagaaactgagtacatgaggcttcagagacgtaaaattggaatggatgacttcgagcagttaacggtgattgggaaaggtgctttcggtgaggtgaggttatgtcgtgctaaaggtacgggagagatttttgccatgaagaaattgaagaagtcagagatgcttagtcgtggacaggtggaacatgttcgatctgagaggaacttgctggcagagg

SEQ ID NO: 23495 - DNA, 234 bp, Glycine max
  Clone ID: 701102133H1
gaatcatatttcatttatttgttctcacatttctatttagtatgtctgctcttgttacctatttacccgtttaatgtattagtctagttgcattgcatcgagactaatacattaaacgggtaaataggtaacaagatcaccatactaaataaaaatgtattagtctcgatgcaatgcaactagcaaatttcagtttgcttgacttgtttgtacttaaaaacaaacaccaaaagg

SEQ ID NO: 23496 - DNA, 275 bp, Glycine max
  Clone ID: 701102134H1
ctctcagattcagcaattttctattttctcctctcatggcttcagattccaaaaaggatttccctgctgatgacaaagctggaacagaagagagtaaaacatccaaagatgagacttcatctaaagattctccagcagaacaaagagcgacagtacttttggacctagacctggacctgctgggcatccaggcaacccttttgatctctcagcaatgtctggtctgctcaatgatccaagtatcaaggaattggctgaacagatagcaaaagatc

SEQ ID NO: 23497 - DNA, 270 bp, Glycine max
  Clone ID: 701102136H1
cctcgagcgaatcggctcgagctgaagggttcagcagttaaggacaagagacgaagattctgagctcggaaccattgcgctggccatggcttccaaccatcttcgaaacctcaatcgcatctccatccaccattttcaggctctcctcaacgatactaccaggttcttctccgacgctgcttcttcattgcctcaaccgcaacctccctcatcatccttgaagcacaatgagctcgccaagttcgccgccatcgccgatacctggtggga

SEQ ID NO: 23498 - DNA, 272 bp, Glycine max
  Clone ID: 701102138H1
ctcgagccgtccgagttgggcagcttgttattctcagtgtacctggagaatttacaacaacggctgggaggcgtcttcgtgatgcagtgaagacagtgctaagtggtaacaaaggctttggtagcaacattcatgttgttatagcggggttgactaatacttattcacagtatgtgactacatacgaagagtaccaggtgcagagatatgagggtgcttccacactgtatggtccacacacactgagtgttctacattcaggagtttacgac

SEQ ID NO: 23499 - DNA, 269 bp, Glycine max
  Clone ID: 701102139H1
gaaacagctatggaaggagaaaatggaaagaagctgaaaatactgtgcctccacggattcagaacaagtgggagttttcttaaaaagcaaatcagcaaatgggatccttctctattcattcaatttgatatggttttcccagatggtaaataccctgctcggagggaagtctgacatagaaggcatcttccctccaccttactatgagtggtttcaattcgaaaaggacttcacagtgtactttaacttggaagaatgcatctcatact

SEQ ID NO: 23500 - DNA, 266 bp, Glycine max
  Clone ID: 701102140H1
ggtaaaataattggagagcaaatggacttcgacacccttttgacctttattaatgagttaagtggtcacatcgatcttgatgcaaccctcagagatgctccggctctatgtatatgtgccggtgagaacggtgctgctcgtataccccctggaaccccaccgtcgttgcctcatgaagatggttctttttacgcccaacaagaacaagatgagatattgtaaatagattcatatttatcataaattttttggtgatacttgaatat

SEQ ID NO: 23501 - DNA, 265 bp, Glycine max
  Clone ID: 701102142H1
cctcgagccgctcgagccgattcggctgagttgacatttatgatggtttacgtgtggagcaaacaaaaccccttcattcacatgagcttcctgggtctctttactttcactgctgcctaccttccatgggttctcttggggttctctgtactcgttggtgctagtgcttgggtggatctactggggatgattgctggtcatgcatattattttcttgaagatgtttatcctcggatgacgggtcgtaggccgctaaaaacaccat

SEQ ID NO: 23502 - DNA, 266 bp, Glycine max
  Clone ID: 701102143H1
ggaagagagaaagaaggaaaatattgaagctcttgcaattctcatgaactgtggagtcgtgttgggtttctattgttggggttgggagttcttaactgcccttcttctcttctcttctcatcaaccttattgatcattctcttcatcctcctcttcttcttcaaaaaccaatttctttttatatatatacaaataaggaagacatcaaagaaaaaaatagcaaaatatttttttaaaaatatggaaggaacaagtgcaaaggggtt

SEQ ID NO: 23503 - DNA, 268 bp, Glycine max
  Clone ID: 701102144H1
gaggcagagaggtgtgcatgtgaatgctgttaggcccatcatgaataataatcctcccaatgttgaagatgtagctgcagctgcaatggggaagaagaaagtgaagaaagagggtgagcagaaggtggggaatattatggtggaggaagaggagataaaggaaagtagtactagtagagacagcatggtgggtgggtatttgcagcaacatcaacaaggtggcatgctgatgggttggaattgggaggagaatatgaatatgccattg

SEQ ID NO: 23504 - DNA, 265 bp, Glycine max
  Clone ID: 701102145H1
cggctcgagaaattttgctgttcccaatttgtttcggatctgtgttgacaaaccctaaccctgaggagtatgagtggttattgagattgaggaattgacgaaaaggaaaggaaagggggagatgtacctgaagaaaccgctatggagtgaaacagggaaagacgatggtggaagtgcaaagacagaagaagaggatcatggtgatggtgcagtgagtgaggtcgtgaagtcactgcagcaacagagagtgtatagagaagtcact

SEQ ID NO: 23505 - DNA, 260 bp, Glycine max
  Clone ID: 701102146H1
ccaaacatccatatcaaactcatcatcatcctagctttcttaatttccctctctttaacaaacgtcgtcgtttcagctcgactctttcccaacgtctcctcctggctcaacgcccacgcccctactggaggcgcgtgggatgcctttctcaactttaccggttgtcaccgcggcgacaagtacgacggcctcgccaatttaaaatcatactttgaacgattcggttacttccctcacgcgccgccctcctcgaatttctc

SEQ ID NO: 23506 - DNA, 269 bp, Glycine max
  Clone ID: 701102147H1
ctcgagcgaatcggctcgagggcgagtcagagaaaccctaggtcagaagaacagatgcccgctggtcatggtttgagatcccgcaccagagattccttctctcgtcctttcaggaagaagggaaccatcgccctcaccacatacctgagaacctaccacgtcggcgactatgttgacgtcaaggttaacggtgccgttcacaagggaatgccccacaaattctaccatggccgcaccggacgcgtctggaatgtcaccaaacgtgctgt

SEQ ID NO: 23507 - DNA, 267 bp, Glycine max
  Clone ID: 701102148H1
gagaatgctaatgttatcatggctacatatgaagatccactacttggtgatgttcaggtctacccagagaaaggaacagttgctttttctgctggtttgcatggctgggcttttaccctgactaactttgccaagatgtatgcatccaagtttggagttgatgaaggacagatgatggaaaggctctggggtgaaaacttttttgatgcagccacaaagaaatggaccagcaagaatagtggttctgctacctgcaagcgtgggttt

SEQ ID NO: 23508 - DNA, 275 bp, Glycine max
  Clone ID: 701102149H1
gtattatttcatcgattctctcccttctctttccctctgcgacaccagatgatggagacgacggcgaacgacaacgctgtcgttgcgccaatcgcggcgttgttgttggtggtgctactcgcggcgagtgtggtggtggaggctcaggagaactcggacgtgaagacgctggtgaagcacatgcacgggaagaagtactgcgacaaaggatgggaatgtaagggctggtcaatttactgttgtaacctcactattactgattatttccagaccta

SEQ ID NO: 23509 - DNA, 271 bp, Glycine max
  Clone ID: 701102150H1
gtcaagaggtcctgatggaagataacctggccgatgatgacatagaaattgaattgtctcctatagctgtccaattagcctatgttcaccagcttcttgggcgtaacaagatgctattgaagcttatacagacgtgattaaacgagatatggctgatgaatcatcaatcgcggtggcagtgaacaatcttgtttcactgaaaggtccaaaagatgtttctgatagcctaaggaaacttgatcgacttaaagacaaggagaatcaaagcttc

SEQ ID NO: 23510 - DNA, 267 bp, Glycine max
  Clone ID: 701102151H1
aaaaaagtgtgaagtgcagagggatcattgacctgctgcgacgaacacgacgtcgtttttgtttccctctgtgagtgatgggattcttcaaaagggtagctggatttcttgggtttggaaaccacaaacacgattccaaggatgagaccgacgacggtcaacctcgagtgagagaaaccgtcgtcgatcgcccccacctcgctcccgttctcactccctctacttccggcgacggcggaattcagggtctggattggtatgtaaatc

SEQ ID NO: 23511 - DNA, 268 bp, Glycine max
  Clone ID: 701102152H1
ctgagccgattcggctcgaggaaaagacctcttcctccactcaactatttcatagttgcccaattgtttattaacggctttttaagttgcagtgttcagatgctcaggttttttggaataggttacagctctcccactttggccactgctatgtctgatttaatccctgcttttaccttcattcttgccatcgtcttcaggatggaaaaattggattggaaaactaacagtactcgggccaagtccattggcacattggtatcaatca

SEQ ID NO: 23512 - DNA, 268 bp, Glycine max
  Clone ID: 701102153H1
tggcgatccatacattctacacaccaatgtgttcagccaaggcaagggcaacagagagcaacaattctatctctggtttgacccaactgcagatttccacacttattcaattctttggaatccccaacgcattgttttttctgtggatggcacccccatcagggaattcaagaatttggaatcaataggagttccttttccaaagagccaaccgatgaggatatactcaagcctatggaacgctgatgattgggccacaaggggtgga

SEQ ID NO: 23513 - DNA, 266 bp, Glycine max
  Clone ID: 701102154H1
aagatgccttgcctttacatctccaccaacattaacttagatggagttaacatcgatccaatcttttctcaagcaaccactgcagtctccacaatcatcggcaagccagagaagtttgtgatggtcatattgaaggggtctgtgccaatatcttttgagggtaataaagaaccagcagcatatgctgagatagtttcaatgggtggtataaattcagaagtgaagagaaagctaattaatacccttggcaccatattgcagtccaa

SEQ ID NO: 23514 - DNA, 142 bp, Glycine max
  Clone ID: 701102155H1
cgctgctccttgcagctctaattctatcccctcaagttcttgcaaactatgagaatcccccagtgtacaagcctcccactgagaaaccaccagtttataagcccccagttgagaagcctcctgtttacaagcctccagttga

SEQ ID NO: 23515 - DNA, 268 bp, Glycine max
  Clone ID: 701102156H1
caacttcatcaaaccaaaaaacacaacaaaagaaagaaagaaagaaacaaagagttccttgctttgtagtaagatatatcatcaaaaatggttttgtcttggactagaagaaacgttttccgccgtgcaaagaaggagaaggaacaaagtcaactattagaagttgaggttgtgattcccaaccactttcgctgtccggtgagtttggagctgatgacagatccggtgactttatcaaccggcattacctacgaccgtgtgagcatcg

SEQ ID NO: 23516 - DNA, 269 bp, Glycine max
  Clone ID: 701102129H1
cttgttccgcatctcctacccctctcctctgctgcatgcaaccatgaagattttcaacccctccaaatcgtttctccagaacgtggtgtgtcctttcgacaccctcttcatcattaaaaggtttaagcccttcgatctgggtctctcccacctccaccaattccaattcctatcctactattgaaaccaaatccctcgttcatctcacccacatcgctatcttcattcaccacaccccagcctccaaatggaccggcgatcgcatccca

SEQ ID NO: 23517 - DNA, 281 bp, Glycine max
  Clone ID: 701102101H1
ctcgagcgcgctaaccaagaaggaactagggttttacagaatacaagctctctctctctctcgtcggttttcgtcaatcaaatccaatccaatatcaaatatgagtcgtcatcccgaggttaagtgggctcagaggcttgacaaggtctatatcacggtgcaattggctgattcaaaaaatgcaaaagtggatcttacgccagatggtatttttaccttctccggtagtgctggtgctgaagaccatcagtatgagctaaaactggagctctttgataagg

SEQ ID NO: 23518 - DNA, 273 bp, Glycine max
  Clone ID: 701102103H1
ctctagatgagaacccttttgcacaagaaactcaacgggcctcattcggaggatctgctgagagccaaccctgtcttcatgccaagaggattttagttgttggttgccccattagataggtattttatcttaagccacaacaaagctctgaccagttgaccctgacagggtggttggaaagagctccacagcttagtagattcaaggttccaattgaggctgctgaaagattgatggacaatgatcttgtcctggagcagtatctgtctcctg

SEQ ID NO: 23519 - DNA, 274 bp, Glycine max
  Clone ID: 701102105H1
caaaaacttaagttcattccttgtgttttgctttcttcctcaaaaccaaacatgtcgaacacatgcggcaactgcgactgcgctgacaagactagctgcaccaagggaaacagctatggtgttattgtagagactgagaagagttacatcgagactgttgtcatggatgttccagcagctgagcatgatgggaagtgcaagtgtggcactaactgcacttgcacggactgcacctgtggccattaaggaatatgtatgacaatgtaattgccat

SEQ ID NO: 23520 - DNA, 272 bp, Glycine max
  Clone ID: 701102106H1
cgaagagccggaaaaggactccgcctcgtcggactacgatcttaaggctattccggggaaagcaatttatggagctagcgacgcgctaccaaaccctaagcgcgtgaaagccgacgagtcaaggcgcgcggtggtggtcgttgactcgcaggagaacgggatccgcctcgtgcacagcctcatggcgtgcgcggaggccgtggagaacaacaacctcgccgtggcggaggcgctggtgaagcagatcggcttcctcgctgtgtcgcaggttg

SEQ ID NO: 23521 - DNA, 273 bp, Glycine max
  Clone ID: 701102107H1
gctgcaatggcttcaagtcaggaggaggtgacccttttgggagctactggaagcccatttgtgtgcagggttcatattgccctcaagttgaagggagttcaatacaaatatgtcgaagaaaatttgaggaacaagagtgaactgcttctcaaatccaacccagttcacaagaaggttccagtgtttattcacaatgagaagcccatagcagagtctcttgtgattgttgaatacattgatgagacatggaagaacaaccccatcttgccttct

SEQ ID NO: 23522 - DNA, 271 bp, Glycine max
  Clone ID: 701102108H1
gaaagcttgaagcaagtgatgccatctagtattcaacccaactcgtttaagactgtgagttaatgtttgtccctggctcttaaccatcattttttttgtctcattgcaatgaatgtaactaggatgattttacaaatttctgtaggtagtgtgtggaggattagctggatctacggctgctttattcacgactccttttgatgtgatcaagactagattacagacacagattcctgggtctgcaaatcaatatgatagtgtgctccatgcc

SEQ ID NO: 23523 - DNA, 272 bp, Glycine max
  Clone ID: 701102109H1
cgtgattatggattgatcaataacattcaccatgacattggaactcatgtcattcatcacctatttcctcaaattccacactatcacttagttgaggctactgaggcagctaagccagtgtttggaaaatattatagagaaccaaagaaatcatctcctcttccttttcaccttattggggaattaataaagagcttcaagactgaccattttgttagtgacaagggggatgttgtgtactatcaaactgactctgagattaatggctcgtc

SEQ ID NO: 23524 - DNA, 267 bp, Glycine max
  Clone ID: 701102110H1
ctggccaaacagcagggtgaagtggtagtggactctatatagctaagttttgagtaggaaattgtgttactgcgggaaggtgactttagggaaacaattatatttaatcgcaacgtttggcttagcgaaaattaaagtggtgaatgactagcgtgaagtgttcttttgagaaacttatgattggatgagaacatcctctattatgtacataagtgtcagtgtcattgcatttgggtttcctggaatgatcttttgatggattgatgt

SEQ ID NO: 23525 - DNA, 268 bp, Glycine max
  Clone ID: 701102111H1
aaacaaggcatttcaattatcgtgtcttcttggctctctgtttaggatcgacatggatttcttttttccattggcaatacttgtgatgatattaggcacaccatactctagtgcttctggaaagagtgaaagtaatgtgaaaacagctgtttttctgtctcctaagtttgaacttggaccgggatcggttgcaaataaatatgattatgatattgattttccaagaggtcatatagcacttaagagtttcaatgcagaggtagttgat

SEQ ID NO: 23526 - DNA, 271 bp, Glycine max
  Clone ID: 701102112H1
gcaagagagaggttgggaaagactgcaatatattctctcatgcaaaagaaagcaccaaaaaaagtaagggagaatttaattccttcccacccttcaacaaaaactggcatgagggggagcaacctttagaagagacaacattttcttttccacttctatttaattattactactttaaattcatctcttatatagctcaacctatatctcagtcttccccggtccatcttgttcggtttctgttccatttcttttttatagcagcataaga

SEQ ID NO: 23527 - DNA, 269 bp, Glycine max
  Clone ID: 701102113H1
cggagatgaaggatggagcccaagttgtgctgaatgataatggtaactacggcaaattctcacacctacttgcttcccaagatcgtgattatcttctctctccaactggggctcaggtgaaagtttctgatcttgaagggagagtagtgggtctattattcgctgcgaattggtacccaccatgccgtggattcacccaaatcctagttggaatctacgaggagctgaaaagcagagtccctcaattggagattgtgtatgtgtcctct

SEQ ID NO: 23528 - DNA, 269 bp, Glycine max
  Clone ID: 701102115H1
ggaaaaatcactctcatctgagaatccaaacctcctcctaatttaagtggtgggtcagctactatggcttcgtctctgttactagcggtggtgtttgtgcttgatctggttgcttttgctctcgctgttgctgcagagcagagaaggaatactgcctcgttaaataaagacagtgcaggtagaaactactgtcaatatgactcagacattgcaaccggcctaggtgtggggtccttgtttatcctagttgccagtcaggtgatcattat

SEQ ID NO: 23529 - DNA, 272 bp, Glycine max
  Clone ID: 701102116H1
aaacactttttttattgccacgtcacttatgataattattcacttcgttttgggaattaaaacgatggagtgagccaattggtctcaaaatctctcggcttttgcttcaattcagaccacacgtaaatgacacagaggggacaataatttattttttgttatctcttttttaattttaggttaatattagactcttaaagtctcataactgaacagttcaatgcagaaaacttctggaaatattataggccattttcttggaggtttatatt

SEQ ID NO: 23530 - DNA, 259 bp, Glycine max
  Clone ID: 701102118H1
cgtcgaccacaatttcgaaggggaccaccaccacgccctcgccaccgacgccatgcccggtgccctcgctgccgccgatcctctctgtgccgtctgcgccacgccagcccctaagaagtgctcgcgctgcaaagccgttagatcttgttcgcaagcctgccagcagtctcctcggatgtcatccgactcgccagtgtgcaaggatactcgtgagaccactgcaagacgctcggctcagaatggggtccttcatcgtggg

SEQ ID NO: 23531 - DNA, 275 bp, Glycine max
  Clone ID: 701102119H1
ctccctttcctctccgaaccctcgatcactctcacgcgctcctatattcgctcctccaccgtcgctctctcgaacaaccacaacaccatcttcatcacatggcaaacgcagcatctggtatggcagtccatgatgactgcaagttgaggtttttggagctgaaggcaaaaaggacacaccgtttcatagtttttaagattgaggagcagcagaagcaggtcattgtggagaagcttggtgagcctgcccagggctatgaagatttcactgccagc

SEQ ID NO: 23532 - DNA, 273 bp, Glycine max
  Clone ID: 701102120H1
ctaatctattaggcgctgttctctcgtcttctacaaaattttctgttcgatctcaaccaaggttgttccttccaccgccatgagtttcatcttcggaaagcgaaaaacacccgcagagcttctgcgggaaaataagaggatgctggacaaatcaatcagagaaattgagcgcgagcgtcaaggcttgcaaacgcaagagaaaaattgattgcggagataaagaaaagtgccaaacagggccagatgggagctgttagagttatggcaaaagat

SEQ ID NO: 23533 - DNA, 270 bp, Glycine max
  Clone ID: 701102121H1
gttcacagagagaatggctgcggaaaacgttgttgagttcacagacttacccgtcaagaggccaagagaagaagaagaaggaaccaatggcgtctccaacgacgccgtttcagcgctccccaatgaccctcaataccctggcatctctgcggttattcccggttggttctccgaaatcagcccaatgtggcccggtcaggcacattccttgaagatggaaaagattttgtttcaagggaagtctgactatcagaatgtcatggtcttcca

SEQ ID NO: 23534 - DNA, 270 bp, Glycine max
  Clone ID: 701102122H1
cgatgatgctcagaattcgtagccgcgatggcctggagcgagtgagcgtcgaaaaccccctcgccacaacagtctcggacctaaaacggattatccaaacccaattgggaatcccggttcacaaccaaaccctctccaccaaccagaacctcctcttggccaaatccctcgaagatctcctccgattcaccgacatgtccaacctcgatgcgtctctctcgtctcttaacctcggccacggctccatcgtcttcttggactacgagggcg

SEQ ID NO: 23535 - DNA, 270 bp, Glycine max
  Clone ID: 701102124H1
aaaaacctctctcagagtttgctcacccctactcttcttccagtctctatctcaatctccatcaaatttaactatggctactgaagaggttttggttgatcaaatcacttaccctaccaagatcactactaccaagcccctatctttgcttggccatggaatcaccgacatggagattcacttcatccatgtgaaattctattcaatcggggtttatttggagccagaagtagtaggccacttggaccagttcaaaggaaaatctgcaaa

SEQ ID NO: 23536 - DNA, 266 bp, Glycine max
  Clone ID: 701102125H1
aatcccagctctatgagaccttcaccattgcaaggtctaggactagatttgttcatatttgtctgagccactttcttcaatacggacgtcaagtacatttaaaaaatcagctctattcgttgtggtattcgaaaaaggaggtttaagatcttcaaataaattgtgattagaacaaaaaatgcgaggcttaagatttagcattagaaccaaaaaaatgtgataggttttaaatctggtattgtggaacatataacaagttatttaac

SEQ ID NO: 23537 - DNA, 265 bp, Glycine max
  Clone ID: 701102127H1
gaagaaaccaaatgctgctatacgtgatgctgacactgccttgaagattaacccagactcagctaaaggctacaaaatacgaggaatgtcaagggctatgttgggactatgggaagaagcagcaagtgaccttcacgtggcttcaaagttagattacgatgaagagattagtatggcacttaaaaaggttgaacctaatgcctctaaaatcgaggagcataggagacaatatgaacgcttaagacagcaaaagcaacagaaaaga

SEQ ID NO: 23538 - DNA, 264 bp, Glycine max
  Clone ID: 701102128H1
cgcagatccaccaaccgttatggctgccttcagcggtgatgaaacggctccgtttttcggcttccttggagccgcagctgccctcgtcttctcctgtatgggagctgcctatggcacagcaaagagtggtgtgggcgtggcttccatgggtgtgatgagacctgagctggtgatgaagtctattgtccctgttgtcatggctggagttttgggtatttatggccttattattgctgttattatcagtaccggtattaatccaaa

SEQ ID NO: 23539 - DNA, 255 bp, Glycine max
  Clone ID: 701102096H1
ctggagatgtactactctctgaaaaacaagcccgtgtctagcttcacgaactggactaccattgcctctatgtagcggaatgacacatactcccgactcagaacactaggaccttatgctccctttcaagtggaatctgatgaagaagttgggcatttctcttttagatagattgaaaaacaaaaccaactaatgtatcgaaaactacttttctatgcacaataaatatgtatttagattatcttatttttaaaa

SEQ ID NO: 23540 - DNA, 250 bp, Glycine max
  Clone ID: 701102063H1
cgccacttctgaatctattgaatcaacaatcatgtcggacgaagagcaccatttcgagtccaaggccgacgccggagcctccaaaacctaccctcagcaagccggtaccatccgcaagaacggctacatcgtcatcaaaggccgcccctgcaaggttgtggaagtttcgacttccaaaactggaaagcacggtcacgctaagtgtcactttgttggaattgatattttcactgccaagaaacttgaggat

SEQ ID NO: 23541 - DNA, 233 bp, Glycine max
  Clone ID: 701102064H1
cggatcgaggcaggagcgttctggatttgaagggacctggacctgtaatcctcttattttcgacgactcatacttcacggagttgttgagtggtgagaacggaggtctccttcagctaccttctgacaaggctctctttgtctgaccctgtattccgccctctcgttgataaatatgcagcggacgaagatgccttctttgctgaatgcgctgagggctcacaaaagctttcc

SEQ ID NO: 23542 - DNA, 243 bp, Glycine max
  Clone ID: 701102065H1
ctgttatgtttggcatgtgctcaattttccttttggtggcttgtatcttgcaaaggcgactgatggtgatttccgataagccaaaaacagaagattggcaattgaaggatagggacgcagagtcagaaccattgaacctttaactggcttttgcctgagttttgaggaggcaccgaacttagctacttaagtcttactaatgcagtttccgtctacatatgtgcacgatgcgatttgagtgaa

SEQ ID NO: 23543 - DNA, 213 bp, Glycine max
  Clone ID: 701102066H1
ggcatctacaaatatgttaacgatgttgtggaagggctacttgcaccagaccacaaaatcgggagatttatatcagatgctgtaggttcccttcccaaattgtccccatcagtttttgataagcttgtgaatgacagtttgcaggatcacttgcttttgctgtatttatctagtattacaagaacgcagcttagcttggctgaaaaattgaac

SEQ ID NO: 23544 - DNA, 224 bp, Glycine max
  Clone ID: 701102067H1
tgacaatgcaggcaacagaccttattctgctgggcctgggattgatcatcgtcgcgtgggggtggccgagcaagtgcagaaccatatgaggggatgcgttcgaccatttcagagtgtgcaaacggtgggtagcttttcaagtcctcagcatgcgtctagcgcactgaagctgagacagcatattccgcgaatgacgtccaacacattgctcaataggcctgcag

SEQ ID NO: 23545 - DNA, 238 bp, Glycine max
  Clone ID: 701102068H1
ctaatttctcgaaaggtagggttttgcagagcctcgtcctcctctcacggtttcttctttttatcttctcacctttcttcttccactgctctaatctaagatgggcaagtcaagcaagaaatcagctctcaaggtcgacgctgttccagctgtggttccgccatccaagtctgccaagaagggaggcaagagacaagctcaagatgaaattgagaagcaattgagtgccaaaaaacag

SEQ ID NO: 23546 - DNA, 239 bp, Glycine max
  Clone ID: 701102069H1
atcgaatcgccccaagaccatcatgcggaagccgaagaaggttccctcgttgctgcaaaacctaaagagctacgaggagaagcaagcccatgtcgagaccctcgagaaggagctcgacgcgctgttccgctactaccaagaagtcatggctcagaaagtgcgtgtcgagctgagccagtgcggtggttcgcgaaatgttgtcgtcgcggcgctgatggaggagagcgaccttccactgt

SEQ ID NO: 23547 - DNA, 228 bp, Glycine max
  Clone ID: 701102070H1
agttctagcaagcagaatggggttgtccagccatatgtatgctaaggttgttgccttcagcaaggtcccacttccaaattacagatatgatctggatgatcggcggcctcagagggagtgagcttgtctatcaccatgtatacccagttaatgttttttgaggaatatcttggccaaaaatccagatgaacaaaagcttttcagatttgtcatctgcagatccagcag

SEQ ID NO: 23548 - DNA, 238 bp, Glycine max
  Clone ID: 701102071H1
gtcttgtagcgtgggacaccggtggttccatcccccaccaccgtttatcaacaatgccttcctcactctccctctcactcacacccctctctgtgttccctccccgcagagtccccactccttctccaaaaccctatcgcctctccgtcaaatcctccatcaacaaaccccctgacgccggcaccaccaagcccagctcctggctcagccccgactggctcacttccctctcccgctc

SEQ ID NO: 23549 - DNA, 238 bp, Glycine max
  Clone ID: 701102072H1
gtacttactcacagatatattttttttttttgtctccatcattttctcgagagctttcagtttgtgtggttcatctttcttcttctccttccctcccccctctgtaaaaccccgcttctctgaatccctttctgttaatcatctgtctttcaagctaagattttcgggtttgtctattaattcaccaagaagcaaacttagaaggatttttcgaaagccaggtgttttccagaaacga

SEQ ID NO: 23550 - DNA, 239 bp, Glycine max
  Clone ID: 701102073H1
ctaacgcgtgcatagcagagtcagagacagagacgcagccatgcggcggagacctgcgaggtgttataggcaaattaagaacaagccataccccaagtcacgtttctgccgtggtgttcctgatcccaagatcaggatttatgatgttggtatgaagaagaagggtgttgatgagtttcctttctgtgtccatctggttagttgggagaaggaaaatgtttcaagtgaggccctggaag

SEQ ID NO: 23551 - DNA, 209 bp, Glycine max
  Clone ID: 701102075H1
gggacagccacctaataaagccacctgcatgtcgaaatttccgttaacggttgcagggagcggcacttcacagaaggtctcgcttgtgaggtcgaaggcgaagatgagatcccgctcgtcaggttggagttttcgggtgacgtgacaatggagggagccggagacgaaaaacagcatggtaggagtgtgcacagaggcgctcggcatcg

SEQ ID NO: 23552 - DNA, 246 bp, Glycine max
  Clone ID: 701102076H1
caccccttatccgatcatggctactgatgcccgtcactcgcgtcgcaagtatcgccgatcatcctctccggaggacgtggacagatcctcgaagcgccacaagcaccgccaccacagccaccgccaccgccacgggagcaaaaaacgcgacgaagagattaaattcgatgatcgaacaattggtgcggttccttctccaactccgcacgggcatctccctgacgacgatgatgtggaggagggaga

SEQ ID NO: 23553 - DNA, 151 bp, Glycine max
  Clone ID: 701102077H1
gagtgaaagagaatatctgagactccgattctgagagtcgagacgagtgagtgagtgctgcttctgcttctgaatcaaatcattcatcactctctggttctgatttttctgacaccaaaatggtgaatcctcgaattccacgttcaaggat

SEQ ID NO: 23554 - DNA, 246 bp, Glycine max
  Clone ID: 701102078H1
tgaggtccgtgatagggctacactttacctggacacacttggaggtgatggttcagttgttgagactgataaagatgtaaaggacttcctgtttgggccatttgatatcccacttgtcaatctggagactagtttgaaaaactatgaaccttcagaagaaggttttgacattaactctgtgcccaaggaggtcaagtcccagccacttgcagaaaagaaagcccctggtaaaaagccaactggttt

SEQ ID NO: 23555 - DNA, 230 bp, Glycine max
  Clone ID: 701102080H1
tagaacccttccacggtggtgactgcgcgatgggtgcctacaagtatgtttcagagctatggcgcaagaagcagtctgatgtcatgcgcttcttgcagcgggtgaggtgctgggagtataggcagcaaccttccattgttcgcttgacaaggtcgacccgccctgacaaggctcgtcgcttgggcttcaaggctaagcagggctatgtgatacggcgtgttcgtgttaag

SEQ ID NO: 23556 - DNA, 244 bp, Glycine max
  Clone ID: 701102081H1
cgaaatcacaaaccaagcttaattacccaagagagaaattaagaagctagtttgcttgtttttcggtgaactcagggagtcagatagataatactgatccctcgagatattgagattcatctaagagattaatatcatcctacccaaccacaagcttagattgaaacaagatggaagtggtggtacaaagtcctagtagtccaaccatggataatttcgattttggtggcaacatgggttcgat

SEQ ID NO: 23557 - DNA, 237 bp, Glycine max
  Clone ID: 701102083H1
ggctgccagtgttgtcagctgctccaaagcatgctccacattctttcaaaagtgctccacctcctccagagttgaaccatgtagcacagcctgctgttcagcagtcaagctctgcatctatgtatgctcccgagtcagggaccgaggcagcagaagaaggctatgcactagaagaagatgaagtaacatctgtctatgttagaaacttgcctgctaatgttactgaagtggagattg

SEQ ID NO: 23558 - DNA, 235 bp, Glycine max
  Clone ID: 701102084H1
agggctcgagctcgagcgcttctgctctctcacgagaagaatactactaactgtgttgtaatacatgagtagcgaacaagatgaatccatggaacatgagaacttccaagttactctcacaacaacttgcttatcctccttatcgcttggtagaagagattccaaacatgggaaattccagttgtgtgagcaaggagccaagaggttcacagatgccaatcttttataggtggcc

SEQ ID NO: 23559 - DNA, 235 bp, Glycine max
  Clone ID: 701102085H1
ctcaatagtagtgcttcttcacttcttccattctccgccaccgccaccacaactaccaccacggatggcggcgacggcgacggcggaagcgaaaacctactggtgccacgagtgcgacatgagcgtgtccctgactctcccaccctcccctctcctctgccctcactgccacacccacttccttgaactcatggactccccaagcctctcccaagaaaacgacgccgaatcatcc

SEQ ID NO: 23560 - DNA, 127 bp, Glycine max
  Clone ID: 701102087H1
ctcgagcgctttggtggagcagattgctgaggaaccaggaaagcttggaaccttttggccttgtgaatggctttccggtgattttcctgaggctcggctgtttaccctaacaatacaagactacatc

SEQ ID NO: 23561 - DNA, 238 bp, Glycine max
  Clone ID: 701102088H1
ttagcgctcaggttcttcctttaacccttctcttcttatgccttattaatgtttgttttattgcgacgggactctctgttagggttagggttagggttaaattcgattcggattcatcttgtcgaatttgggtacgatttccttcagtttccctcattttccgatatcgatgcttggggtttcgtttcgccttgattccctgtggtgcttaccgttatcggctcttcttagggttccg

SEQ ID NO: 23562 - DNA, 241 bp, Glycine max
  Clone ID: 701102089H1
ctggttccgaggttgtttcccagttcttgccaggcagataacaagtggtctttcatgacatacctgccggacttggacatcaagaatggcaagcgccctttagacactgatggggaggaagaaccccagccaaggaaggtgaataggagagcggattctcgccatcatggcgagaccactcggctcttgtttcaaaaacaatcgtgtcatgctgatgattctgttgttccacaaatggatc

SEQ ID NO: 23563 - DNA, 242 bp, Glycine max
  Clone ID: 701102090H1
ctcgagccgtgacattatagatcgtgtgcctaaaattgatcctgatgatacctcagcattgaagccacccaatgtatatggaagcctcgagttaaaaaatgttgatttttgttacccatctcgtcctgaagtgttggtattgagcaattttagcctcaaagtcactgggggccaaacagttgctattgtgggagtttctgggtcaggaaagagcactataatatctttgatcgagaggtttt

SEQ ID NO: 23564 - DNA, 244 bp, Glycine max
  Clone ID: 701102092H1
cttcaaatcccccctgcaattgctcatcatccttctggttttttcatttgttctctcttctgctgctctccaaacaacaatttcagggtgttgaggaattgaaaaatggagaagaaatgtttgatatggcagaagagttcatggtagagagaaggattgatttggagagtaatgattatccagggacaggagcaaacaaccggcatgatccaaagacaccaggaggaccttgagacattaatgc

SEQ ID NO: 23565 - DNA, 244 bp, Glycine max
  Clone ID: 701102093H1
cttctttcaattgcttaccagaccaagcatggaagctaccggggaaaaagcatggcattttctgcatgtggttcggaatatggaagcaaattctatgctatttaattatggcataacaaccaccttgtgtcttcattaattcctatgcaaatctccaacctagaagattaaccatgtccctttgtaagtaccctgaggctgaaatagtaaccctttatatacctttctgatctattgacatatt

SEQ ID NO: 23566 - DNA, 246 bp, Glycine max
  Clone ID: 701102095H1
cggctcgaggcttttgatcccgtccttcggaaatggtatcggtatcgcattgaacttccatgcattggaacttctaattggttcattgcttcatcatatggcatggtctgcttcatggacaatgacagcagaagtgaaatatgcatctgcaacccaattaccaaaacctacaggaagcttgaggagcctccaggtttgaaagtttctgattacagtgcattagcaatctcagtgaacagggaatct

SEQ ID NO: 23567 - DNA, 243 bp, Glycine max
  Clone ID: 701102062H1
accaacctcagttgtgcctcgagcccaccagaaacataacaaagaagcactacagaggagttcggcgccgcccctggggaccatacgccgctgagattcgcgactctgcccgccacggcgccagaatatggctcggcaccttccaaaccgctgaagaggctgccatggcttatgaccgagccgcgttcaagatgaggggctccaaggctttgctcaatttcccagctgaaattgttgctgcaa

SEQ ID NO: 23568 - DNA, 247 bp, Glycine max
  Clone ID: 701102026H1
cttcttacaagttacatccattgagaaacatgaaggtctcccccttagcattttcaatcctttttttgtccttcaccatagaactcttcattggcattgcttcagcagcacaagaaccagtgcttgacacctcaggccagacgctgagaacaggtgtcaagtactacattctaccagtcttcagaggcagaggtggaggcctaacagtttcaagcagtggcaacaacacatgccccctctttgtggt

SEQ ID NO: 23569 - DNA, 248 bp, Glycine max
  Clone ID: 701102027H1
aagatgaaatcctctcttatcttgttatttatgatctgtggtggagtgattgcaactcctccagaggatccaattccgtgttcttcaaagaacacagactgcaccatcacaaacacctatggcgtctttccggaccgaagcatttgccacgccggtgaggttatgtacccaaacacagaggaggagctcatatccgcggtggcctcagcttcgaagaacaaaagaaaagtgaaagccgccacgcgctt

SEQ ID NO: 23570 - DNA, 251 bp, Glycine max
  Clone ID: 701102028H1
cacacaattcctacacatttctactctttagtttctccaattttctttctcaattctcaacaatggccactacaacacaacttcacttaccccctggattcagattccatccaacagatgaagcactcgtcatccactacctttgtcgcaaatgcgcttcgcaacatatcgcggttcccataatcgccgaaattgatctgtacaagtacgacccttgggaccttccaggaatggccttgtacggagagaaa

SEQ ID NO: 23571 - DNA, 248 bp, Glycine max
  Clone ID: 701102030H1
ctttcatctttctccctaacggtatcgagggaaaaatatggcggacagaacacagatgccaggcaccgcgcttctgcgccaacaattgcggtttctttggcagccctgccacgcagaatatgtgctccaagtgctaccgcgatttccagctcaaggagcagcaatcttccaacgccaagatggttctcaatcagtcgctggttccttcaccgccaccggcggtgatttctcagccgtcgtcttcttct

SEQ ID NO: 23572 - DNA, 254 bp, Glycine max
  Clone ID: 701102031H1
ggagtcatctcactgctgagggcgatgtcgagttcaaggcagtcctgtttgtaccacctaaggcacctcaagatttatacgagagctattataacgcaaacaaatccaacctgaagttgtatgttagacgtgtgttcatttcagatgaatttaatgaactgttgcctaagtacctaaactttttgctgggtcttgttgattctgacacattgccacttaatgtatcgcgcgacatgcttcagcaacatagtagt

SEQ ID NO: 23573 - DNA, 240 bp, Glycine max
  Clone ID: 701102034H1
gcgatcacctttctgcttattcaaaagaaccccttagtttttctctgaggttgaagattgctctaggatcagccaaaggtcttttatatctacacacagaagctaatcctccaatattccaccgagatgtgaaggccagcaatatattattggactctaggtacacagcaaaagttgctgattttggactttcacgacttgccccagttccagatactgaaggaaatgtacctggtcatg

SEQ ID NO: 23574 - DNA, 240 bp, Glycine max
  Clone ID: 701102036H1
gaagcttcatcacctcactccaccaatccccacttcgccctctctctctcactctcaccatggagaacctctcatactttctcttccttctctttctcttcgcaacccacgcacgtcccgacctccccggtacgtgggagcttctcgtcccggacgccggcatcgcttccatgcacacggcggtgccacgcttcaacacggtggtcctcctcgaccgaaccaacataggcccatcccgaa

SEQ ID NO: 23575 - DNA, 103 bp, Glycine max
  Clone ID: 701102037H1
cagatttcatttttcttcttcttcttctctctctgctttgtgcttattgtattttatggacaaaggatggggactcacccttgatacctcttcctctcaatct

SEQ ID NO: 23576 - DNA, 237 bp, Glycine max
  Clone ID: 701102038H1
gagctctttagggtttatggagttactgggtgtgcaggactatagtcctctgcttgagttgcctcaactttcaactgtgtccgtgcaatctcatcatcactctacagttacggttccttctgataacgggaaagagtgttctgaggtgttgaaccaccagcctgccactccaaactcttcttccatttcatccgcgtccactgatgcagtcaatgatgaacagaagaagactcctag

SEQ ID NO: 23577 - DNA, 243 bp, Glycine max
  Clone ID: 701102039H1
gttccttttgaaggttagaagtgctacaatacaaacaatggcagctactcaggaagatgtgaagcttttgggtattgtgggaagcccatttgtgtgcagggtccagattgcccttaagttgaagggagttgaatacaaatttttggaagacaatttgggcaacaagagtgatttgcttctcaaatacaaccctgttcacaagaaggttccagtgtttgttcacaatgagaagcccatagcaga

SEQ ID NO: 23578 - DNA, 242 bp, Glycine max
  Clone ID: 701102040H1
cgtgttggctttgactcaaaagctgtgtgtggcatcagaaaatggcgcagtttatcaatggcacttctccacccaaatcttcttgccactttcaattccaacactcttacctttccttccatcaaactcaaaccctcactctcgcacgtgccttctccaacccccacacgcttcagtctctctgtttccgcggcgggaaccaccgcttttgccgcccctcccactccccaacctgagaagct

SEQ ID NO: 23579 - DNA, 246 bp, Glycine max
  Clone ID: 701102041H1
cgactatgttcacatgacatactggcctttaaaagagatcatgttgctaggtccgtgctggttcgaagccctttcatccttccggatggtagttcagaatcagctacaacgtcccttaaagggaacacagagggatacagatcatgcagtgaaccacttcaaagatcagatgatgttactgtggacagttcagtttctgctaagcgccgtgtcagaatcgccatatctatggacacagactcaaaa

SEQ ID NO: 23580 - DNA, 245 bp, Glycine max
  unsure at all n locations
  Clone ID: 701102042H1
gaaggactttaggttgggatttgggaattagggttattcgcgtggcgaagatgattgaggtggttttgaacgatcgattggggaagaaggtgcgcgtgaagtgcaacgncgatgataccatcggcgacctgaagaagcttgtcgcggctcagactggcacaagagccgacaagatccgcatccagaagtggtacaccatctacaaggatcacatcactctcaaggattacgagatccatgacggc

SEQ ID NO: 23581 - DNA, 245 bp, Glycine max
  Clone ID: 701102043H1
gtcttactgttagcaatgccttcctctttctccatccatttcttcctcctcctctcaatagcccttttctcagtttgttgcttagcagcatctcaagctcccaccaccaaatcacactcctatatccttcccattaagaaagaccccgcaacaaatttgcactacacttcagttggcattcgaactcctacgcacaactttgatttagtcattgatctttctggtgaaaacttatggtacgattg

SEQ ID NO: 23582 - DNA, 251 bp, Glycine max
  Clone ID: 701102046H1
gggaaaaaacatgttcttcttccaagtgtgaacaatattataagcgatgtggaagggatagagattagtataggtgatggtgtacttgagagctcacaacaaaatatgtttcaagggattctgtccccgggtccagcttcgctatctcccattccttcgaattttttctctccaccgtcttcttcggatccaagcatgattagcttccttcgtgatttgagtcctatgtttcaaagcggaagaaattttac

SEQ ID NO: 23583 - DNA, 253 bp, Glycine max
  Clone ID: 701102047H1
attctttcagcctcccttcaacacccttttggcccttcattcttccaagtctcaaatcgaagctcgaagacctgcgaagaacaaagggttgtttaaattctgtgtggttgttgttggaggttgaaatacaagttgccgcctcaagtgtgtgttaatcttaaatttcacaagcaagttgtatttttggagtattgtattatatgaccaaatattttagtgttttaggactagatattttgcttctggtggcaat

SEQ ID NO: 23584 - DNA, 249 bp, Glycine max
  Clone ID: 701102048H1
cctcacgagtgcttgggattgactttcttcttttcatagcattacataccatcttaggtataggtgtggatgcgcctacaggatgatttttctccccccagtgtttttatgatcttcaatttacttgtgtttcaagccatcatcattttgtactattttacagtgctaatcattgtggggaatgggttgtgtatgtggtctagtatccacatcaataaaggttgtgtaatgatggtaggtattggtgat

SEQ ID NO: 23585 - DNA, 223 bp, Glycine max
  Clone ID: 701102049H1
gttgaagaagaaattggagaagatggaagcgcagaacagcctcgttgatccgatcaaagccaccccagggaaattgaagaggaattcatccatgaattccaaagagtcctccaaaaatggaaaccctgagcacattgctgtacagacattctcattccgtgaattggcaactgctagtagaggcttcacagccgaatgtcttttgggtgagggatgctttggc

SEQ ID NO: 23586 - DNA, 64 bp, Glycine max
  Clone ID: 701102050H1
ggtccgggagtcgcagctgtgtcaagccgcgtggaaaacgtcttgaaggccgccgatagcgtca

SEQ ID NO: 23587 - DNA, 240 bp, Glycine max
  Clone ID: 701102052H1
ccgcccccaacggcgacatcgccgccttaaccaaaatcgactcggcgaggcagtgggtggcgacgcacatcaaaccctttcaccctcagaccaaaattaattacatcctcgtcggcagcgaggttctccactggggcgacaccaacatgatccgccgcctcgtccctgccatgagaacccttcactcagccctcctagccgagggcataaccgacattaaggtaaccactgctcactctc

SEQ ID NO: 23588 - DNA, 240 bp, Glycine max
  Clone ID: 701102054H1
gcttcttccatcctcagagcttgccgtcaacaacgattcctttcggttttctgtttctctggattcattttcatttttacggctaccagaatgtccagctcatcggaatattcggcattttccggcccccgcccggccaagtcgccggccgagaagtccactttctctcagacttgtagtctattgagccaatacatcaaggaaaaaggtgccttcggagaccttaccctcgggatgact

SEQ ID NO: 23589 - DNA, 239 bp, Glycine max
  Clone ID: 701102056H1
ctgagaaacatttcactaatagagagacataagcataatattgagaaataatggagggttgtacttattgtgtgaagttgctatgccttgttgggtttgtggtgcttgtgagtactattgcaggggtggagagtgctggtgaatgtgggaaatctaccaccccagataatgaggcttataagcttgcaccatgtgcctcagcagcacaagatgagaatgctagtgtttctcagagttgc

SEQ ID NO: 23590 - DNA, 85 bp, Glycine max
  Clone ID: 701102057H1
ccgaatgggagcatcatcatcacattgaaaagacaaggcaagacaatcaatggcgacgaccgcttcaccatcttccaaaccctca

SEQ ID NO: 23591 - DNA, 116 bp, Glycine max
  Clone ID: 701102058H1
tccaattcttcgcttcccaacctgggttttctccataacccttcaagtttaactctttttccatttgggtctctctctcctccttcggatctgcttctgattccactttaaaccgc

SEQ ID NO: 23592 - DNA, 241 bp, Glycine max
  Clone ID: 701102059H1
ctaagaagagctataatgcgacttttggaggacagcatggctgagaagatgcttgctagagagattaaagagggtgactcagttatagttgatgctgactccgatggtaatgtgattgtgctcaacggtagtagtggtgccccagattcattagaagaagctcttcctgtgtaacgtggttgtcttagttagttgagttgtatttttttctctcttttatttgttaaaagaaacatagcaa

SEQ ID NO: 23593 - DNA, 244 bp, Glycine max
  Clone ID: 701102025H1
cgcgaaatcgcgaacagaacagcaacgttaacaatgggttctcgctacgaggtggaactgaagctctcatcggcacgcgctctcaagaacgtgaactggcgccatggcccgaaccgaccatacgtcgtcgtttgggtcgacccaagcaacaagctctcgacgcgcgtggacgaaagcggcgacactgacgcgaattgggaccaaacgctcacaattcagttgccaccaacagctctcgaggatc

SEQ ID NO: 23594 - DNA, 242 bp, Glycine max
  Clone ID: 701102060H1
cgattgttcttaatttcttaatcctccgtcgtgggtggcgatcttgttcttctccggagcggattctcagatccatggaccaggctcatattattaagccaaagcctctcagatccgcggtggcggcgtgacggaaatgaagtcctcaagccgtctcttcacgatcggactggtgtcggcgtggtactcctccaacattggggtactgctcctcaacaagtaccttctcagcaactatggct

SEQ ID NO: 23595 - DNA, 247 bp, Glycine max
  Clone ID: 701102061H1
gcagacttctcccgggaaaaaaagtaggtaaaaaaatatgctaagtataaattgtctactgatgaaatacgaaagctgatgatattgaaaaaaaaagaattgtaaataaggttcaggttcgacttccatagagaatatagatgatattgtctataatgatagacaaaaaataaaaaactttcgaaagattttatccaattgaaattttaaaaatgactgggataaacttaagacttcaattattgaa

SEQ ID NO: 23596 - DNA, 58 bp, Glycine max
  Clone ID: 701101993H1
caatgacatgtctcacactttccaaagccttgtcaaaatcgtcgccgtgcccggaggc

SEQ ID NO: 23597 - DNA, 75 bp, Glycine max
  Clone ID: 701101994H1
ccgcgtttccgagaccgagcgcgtatccatgctcgccatggaggatttgaaagtcaactctgagtgcatgattac

SEQ ID NO: 23598 - DNA, 260 bp, Glycine max
  Clone ID: 701101995H1
cctttctacaacactggtgctttgtgctgggttaagtccaacgccaatctgaagcagcaagtgggtttggcaccaagacccatttgttcatttgaggggaataatcagaggaagtttgtggcaatggcttctaccgttcctgtggagcaagtcaacaatggccccctgcaggtgacaggtgactccttcatcagacagcatctgaggaagttggctccttatcagcccattttgccctttgaggttttatcagctcgcct

SEQ ID NO: 23599 - DNA, 255 bp, Glycine max
  Clone ID: 701101996H1
atccttcggttgtggatgcttctgattgtctctttggtaagcaaggaactttctatagggatcttgactttgcccttgtgttgaattgtgagagaaggccaaccataattgatctccctcccaccaagttcaatgattccgaccttgggaagattccttttgttgccggaatggtactattttgcctccgtccatggatcctagcatgtctgcttcgagattccaaatgcaggtcttcaagatgccgccggcgct

SEQ ID NO: 23600 - DNA, 255 bp, Glycine max
  Clone ID: 701102001H1
ggttgccgtgccaccatcttctccaaagttatcatattcgaagagaaaaaaggagtgactgtccaggttgggcaattagggacggaaaaggagaaacacgaaaatgtttttccacatagtactggagcgaaatatgcagcttcatccacgctactttggtcgtaaccttcgcgataatctcgtttccaagcttatgaaagacgtggaaggcacttgcagtggccgacatggatttgtggtggcagttacagggat

SEQ ID NO: 23601 - DNA, 250 bp, Glycine max
  Clone ID: 701102002H1
tctacatcctcttccatttctctgcaactgcattctctttccctttccgccgcagcgattttcagagatttaaccttctttgttcgtagatatgcgcggttactgattagtcgatgatagctgtcgacaaatttcacatggaaagagaacgaacacggaaacgccctcgtcttgcatgggacgttgcccctccctcagtgtccgaggcgcaacgggctctgccagtgcccggtgacgaagacttcgaaag

SEQ ID NO: 23602 - DNA, 240 bp, Glycine max
  Clone ID: 701102003H1
ggggacacataaacccggcggtgacatttgggctgtttttggcgaggaagttgtcgttgcccagggcgattttctacatcgtgatgcaatgcttgggtgctatttgtggcgctggcgtggtgaagggtttcgaggggaaaacaaaatacggtgcgttgaatggcggtgccaactttgttgcccctggttacaccaagggtgatggtcttggtgctgagattcttggcactttcatccttg

SEQ ID NO: 23603 - DNA, 244 bp, Glycine max
  Clone ID: 701102004H1
cgcttgttgccgagcacttcaagaggggctttgatcaacaatggctatcattaacattctcaaaggctatatttcttggaaatggtcttgttgctattttgtctgggctgtttggaaatgtacttgttgatacattggctcttggacctgtggccccctttgatgctgcttcatgttttcttgctattggtatggccatcatactatcttcatggtcagagaatttcggggatccttcagagaa

SEQ ID NO: 23604 - DNA, 245 bp, Glycine max
  Clone ID: 701102005H1
ctcgagccgcttcatctcccaagggattcaatacaataccaggctagaagaaactccactcatcaccatctcaagcaactaattaacaagctagtactctttgagtgtttggcaattggcttagatttcttgtacttggaacaagatggaaagcactgtcacatttgagactgatctcaacctcaaggcaaccgagcttagattggggcttccaggaacagaagaaattgttgaaaaaccacttc

SEQ ID NO: 23605 - DNA, 247 bp, Glycine max
  Clone ID: 701102006H1
cgcggagttcagcggcaccaccaccaacgccagcgcaatcgcgcgtcagatccttgaaaaaatccccggcaacaacgacacgcacgtttcttactctcaggatcgctacatcttccatgttaaacgcaccgatggactcaccgttctctgcatggccgacgacaccgccggaaggcgaattccttttgcgtttcttgaggatattcatcagaagttcgtgcggacttacggacgcgccgttcactcc

SEQ ID NO: 23606 - DNA, 246 bp, Glycine max
  Clone ID: 701102008H1
gtacgcggtgatatttgcggaaatgttcgtgatcgtcagcctcctcttcaaaactccggcgaggaagctggtgatcgtcacattggatcggctcaagcgcggtcgcggccccgttgtcgtcaagaccgtcgccgccacgctgctggtggtgctcgcttcctacctctacagcatcgcaaaaatccggcatcggaacctcgatgctcccgtcgctaaccccaccgaccaagtcctcgtgtacaagca

SEQ ID NO: 23607 - DNA, 249 bp, Glycine max
  Clone ID: 701102009H1
cataaatggctactgaacatgaagacgatttcaaggatgagaagaatccccgccccctcgacgaggatgacatcgcccttctcaaaacctatggtttggggccttattccacaagcataaaaaaagtcgagaaggaaatcaaagacatggcaaaaaaggtcaatgatttatgtggtatcaaggagtctgatactggtttagctgcaccaagccagtgggatcttgtttctgataaacaaatgatgcagg

SEQ ID NO: 23608 - DNA, 247 bp, Glycine max
  Clone ID: 701102010H1
cgcaaggcgtgcaccaacggcgagtgtggtgacgggacttccatggccaatcacttcgagcgacactattgcggcaagtgtggcgtgacctatgtctagcagaaggccgatgcttaaattcgttggaagtgaatccactgtggtgctaaatacattgtagttattcaaaagttctggttaatgtaattgtgcaattagcgttatgagtgtctgggcgtagactagacctttatgaatactgtttcgc

SEQ ID NO: 23609 - DNA, 248 bp, Glycine max
  Clone ID: 701102011H1
cggctcgagataagctacgacgttccatcgggacgaagagatgggcgtgtctcgatcggcgatgaagtgctagacaatcttcctagaccatccttgagcgctgatgatcttattagtaactttgagcgaaagggtttgtcagcagatgaaatggtgacactctcaggagcgcattcaatcggtgtgtcccattgtggtgccttctcgaatcgcttatactctttcagtgacacagtcacacaagatcc

SEQ ID NO: 23610 - DNA, 252 bp, Glycine max
  Clone ID: 701102012H1
ctgcttcttctgcctctgcatcttcccgcaaactagtgctgaggattaaatcaaacgagggaatcaagagatccgtgcggcagactaattcaagaaagaaacccaaagcaaagcaaaagaagaacaaacaaatgtttgatgctatgaaacccaagaaacctccgacagctttcttctacttcttggaggattttcgtaaagaatttcaagagcagaatccagatgtaaagtcaatgcgtgatattggcaagg

SEQ ID NO: 23611 - DNA, 251 bp, Glycine max
  Clone ID: 701102013H1
ctcgagccgatctcacatttcattacttctagccagctattacttcttttccttcctctgtctacatttcatttcattcaccacaatcatggcatctctacattccacatgttcaacaaaaaccgtcctttatgcattggtactgttggcctcttccatggcaacttctaccaggattttgacataacatggggagatggtcgtgccaagatactcaacaacggcgatcttcttactctttcccttgacaa

SEQ ID NO: 23612 - DNA, 252 bp, Glycine max
  Clone ID: 701102014H1
ctctcccactcgccagtgttgcggaattttttagaagtgtgaatgttcgttcatgcatgagcggctcttaaagttgccttgcggattcgattgcgatatattgagactgcgatggcctcagccgtcgtgaatttcttgaacgcgacgttggattgggtgacgtttgcgtcggatggtccttctgcgcgagctgtagttttcggagtccatatcggtggacatttgtttatcgaagtgtttttgctagttgtc

SEQ ID NO: 23613 - DNA, 255 bp, Glycine max
  Clone ID: 701102015H1
agattattaatttgctttataagaatgggtactatgttaaaatagaagaagtggctcaatttctccttaaaagaggaaagctgtcagaagcatgcaaattgttgctttttagtttggaaaatcaccagaatgttgatattgatttgtgtaatgcaactattttgaatctttgtaaaattaacaaggtttcagaagcatttagtttatgctatgaattagtggagaacggtttacatcagaaattgacatgtctag

SEQ ID NO: 23614 - DNA, 256 bp, Glycine max
  Clone ID: 701102016H1
ggtagaaagcgagcttttctctttgggaatgaccaagtttaacgtggaagaagagtctactagtgacttggaggaggaactgaagcgggtgactgcagaaaacaagaagttggccgaaatgctctcagtggtgtgtgagaactacaacactttgagaaaccatttgatggaatgcatgaggaaaaatggtgaaaaggaggtcagcccaacatcaaagaaaagaaagtctgaaagcagcaacaacaatagtaatttg

SEQ ID NO: 23615 - DNA, 240 bp, Glycine max
  Clone ID: 701102017H1
cctgtaaagatctggcatctcgtggatatcctctaggcggttataatattatttagggttttcttttgggtaattagtaaaccgaaattgttttgtgagacctagaaaaagggtttcggttttcataaggattttataatgcatgcagttcttccaaatcactaacaattgtttttaataattggtgggtgtctttcacctatgttgcctaaaaaacctgaaatgtttttttttaaacca

SEQ ID NO: 23616 - DNA, 246 bp, Glycine max
  Clone ID: 701102019H1
aaggaggtcaagtcccagccacttgcagaaaagaaagcccctggtaaaaagccaactggtttgggtgctcccccatcaactgcagatgcatatgagaggatgctttcgaccatttcagagtgtgcaaactttgggaagcttttcaagtcctcagcacccgtggagctcactgaagctgagacagaatatgctgttaatgtcattaaacacatttttgataggcatgttgtgttccagtacaactgc

SEQ ID NO: 23617 - DNA, 246 bp, Glycine max
  Clone ID: 701102020H1
tcaagattcaggtactgcgtttcggaagcagacacagatggctcgtacgaagcaaaccgctcgtaagtccacaggaggaaaggctcctaggaagcagcttgcaaccaaggctgcacgtaagtctgcaccaactactggtggtgtgaagaagccccaccgttatcgtcctggtaccgttgctcttcgtgagattaggaaataccagaagagtaccgagcttttgatccggaagctccccttccagag

SEQ ID NO: 23618 - DNA, 231 bp, Glycine max
  Clone ID: 701102021H1
atgagctggaagcagtttccatttttacaataaataccatatgcttgtgcgtggtttcattgactggccattggaaatattaaacattgaaccattgcagaattctgtattttttttgaaacgatttatccagaatcattggttatgcaagtcgcagactttctagtttgcctatggatgtttaaacagggaaaatcagtaatgctcattaatttcatttagcattcaact

SEQ ID NO: 23619 - DNA, 243 bp, Glycine max
  Clone ID: 701102022H1
gagaatttgaaaaactcggtcaagaacactgtgagccaagtttccaaaaggattcttaccacaggtgtcaatggagaactccatccttcaagattttgtgaaaaggatctgctaaaagtggttgatagggagtacgtattttcctacattgatgacccctgcagtgctacatacccattgatgcaaaaacttaggcaagtgcttgtagatcatgccttggtaaatgcagagaatgagaaggat

SEQ ID NO: 23620 - DNA, 241 bp, Glycine max
  Clone ID: 701102023H1
attttcatggaactgatggatcgaaagcctttgtttcctggcagagatcacgtgcatcagttgcgtctacttatggagctgattggcaccccatcagaggctgatttggggtttctgaatgaaaatgctaagagatacattaggcaactgcccctttaccgccgtcaatctttccaggaaaagtttccacatgtccatcctgaagctatagatcttgtagacaaaatgttaacttttgatc

SEQ ID NO: 23621 - DNA, 244 bp, Glycine max
  Clone ID: 701102024H1
ggggagagagaaaaagagagacgtagacaaaaccgaagagtctctctcttcctatctctctctttcaatgtcagggcacaaatcttccacctcgacttcttcggcttcttcattctaacctatatcagaaggaaacgcggtaaaagaaaaaaaagaaactggcagacgatcttataagccgcaaaattttacaccatttaatttggctgagtcagatccgtccgggatggtatccatggattct

SEQ ID NO: 23622 - DNA, 245 bp, Glycine max
  Clone ID: 701101992H1
ctcgttttgttcgcttcagtctgcaacgtcgctatgtcggactccaccgccacacccctcgaccagcacgccaccacgggctctgaccctagtgcgccacggttcacatcgtgtacaccgagagaccacagaacgaggagcctgaggcctaccacatcagaaccctcacttcagtccttggcagtgaggaggctgcaaaggaagctttgttgtatagttacaagtctgcagccagtgggttctca

SEQ ID NO: 23623 - DNA, 267 bp, Glycine max
  Clone ID: 701101936H1
gttttgagcaacattatggaacccgcactgctatctcaagctggctctgatttggataagtccgtttctcaagagacatttttggaggaatttaagatagtggcaatgagtgtggctaatcgtcttaaggagcaacctgtcatagttgctcacagtgagaacacctttgatggaagtggtgttaagagactattatccaacaagtttgaattggacaagattttgaactcagccatggagactatgccaaaagatcgaaatggaaag

SEQ ID NO: 23624 - DNA, 270 bp, Glycine max
  Clone ID: 701101937H1
tgtgagccatcaagtcatccatataacaaccttggtccaagagatgtgtgcacccaaagtcaccaagagcttgcccttgaagccgcaagacaagggattgtgcttcttaaaaacaaaggtccttctttgcctctctccactaggcgtggccgcactgtagctgttattgggcccaattctaatgtcactttcacaatgattggcaactatgctggtattgcttgtggatacactagtcccttacaaggaatagggacatacaccaagaca

SEQ ID NO: 23625 - DNA, 266 bp, Glycine max
  Clone ID: 701101938H1
tggaaatgcaatcggcagctgaaaaccctaattacccggcgctggactacaagcgaccttccatcttgtcatttcctcggaggcccgccctcagagttacatccgagttcgatagtgaaagcgcagtcttcttccataagatttcctgcaagttgttggacagccttgccaagttcaagttttcgttcaaccacagcggtaaggccggcgacatctccgaacctcaattcagctttgtctccaagcaccttagcctccactacgac

SEQ ID NO: 23626 - DNA, 264 bp, Glycine max
  Clone ID: 701101939H1
ctcgagccgctcgagccgctcgagccgattcggctgagtgacttggctgattctgtacgcttcccactgacggaagcggaccgaacgagaggttagacagatagtgcaacaggtttcacaagtctgtgatgctttgaaaggtggactagaccctttggagcgccaagtgagggatgtcttccatagaattgtgcgcaccgaacagaagggcttgactcacttggcaggccaagcaatgctgagtaacttgttgcccccatcatt

SEQ ID NO: 23627 - DNA, 268 bp, Glycine max
  Clone ID: 701101940H1
caattccttaacagtttctcacccttctcttctcttctcttcatctactcttttcaaaaagaatagatgcatgaagtctggtgacctctgatctgattccctcttgatgtcaaacaacagaagagaacgaaactatcaattatttatttcattaagtaaaaagccttagtggaaaatgggaggttgctgttgttctgccagaaaacctcatctgcaaggggcaccagtatattactattgcccaccaacttttgaagagcgtgagtct

SEQ ID NO: 23628 - DNA, 74 bp, Glycine max
  Clone ID: 701101941H1
cggaatcaatgcaaggaacagtgatccaagtctgagaaaccggagtgggccagttcaggtgccatacactttgc

SEQ ID NO: 23629 - DNA, 265 bp, Glycine max
  Clone ID: 701101942H1
gccgtgtggtgttgtgtttttcttttgtttcatctccatctttttcttcaaatttcccagaagagaaactcacaaagatgaggttatcattgaggcatgctttggtgtttgcgttaattggggcgttgtggaacttgcagagggcagagggtatccgatttgtgatagacagagacgagtgtttctcccatgacgtaaagtacgagggtgacactgttcatgtctctttcgttgttattaaggctgatcctccctggcattacgg

SEQ ID NO: 23630 - DNA, 263 bp, Glycine max
  Clone ID: 701101945H1
ctcgagccgatcgcatttcaaagctacaacttgtcattttatgccaaatgatacaaatgcgataggctacagtatagggtgtggaatgtccttttagatagaaaggaaggtaggttgtattgtacttcggtaattcttgctgctctcatttttgttcacaacctacaagttggtataacgttaggtaaggccaatggactagcttctgttcatgagggagatagagttagttagtgatggttatttaggattctaacagattg

SEQ ID NO: 23631 - DNA, 262 bp, Glycine max
  Clone ID: 701101955H1
atttccatggcggcggcgacgaacttgttagcaacactgggggatctggagacggactccatcgtggctcttctttcgaagctgatcgctgaatcgaagtacgtccagaacaacccgccggagctcattccccaagaggacagagtggtgaagcacgtcttggacgttctgttaccgttcagcaccaccaccggcggtggacccttgctcgtaaaccacgtcacctaccacgccggcagagggaacctcatcgtggagtacc

SEQ ID NO: 23632 - DNA, 259 bp, Glycine max
  Clone ID: 701101956H1
acaataacccaatcatagtctcactcgggattggttattcttattctaagagataatccaaatccaaacccaaaagaacaacacaatgaaaggagaatacgtagagcaatagcaacaccatcctaagagtgaaacaccacctagtatgttctcaaagcttcagcctcagcaccatcctttcccgcaccaccctttccaactctccgccgaggatgccaccaccatcaccccgagcaccgctcagaaggccaactcctcc

SEQ ID NO: 23633 - DNA, 262 bp, Glycine max
  Clone ID: 701101957H1
ctccgtggcattttcgtctttctgtaatttgttcttccctctcacactgttattctttctttctcttactttcttatgaatcagtctcatctcatccccaacaaccacacatgcaacaccatcagatgatgttgagtgaatgctactaccctttaaggtttttgacttcatagctggcgaatttcttgcactttgcttggtttttgtctcttgactgcttgtgttcttcggttgggatgaaagatgatgaagacttcggttt

SEQ ID NO: 23634 - DNA, 63 bp, Glycine max
  Clone ID: 701101958H1
atccagacgcgttggcaaaggcattcgtggagcactactacagcatgttcgacaccaacagga

SEQ ID NO: 23635 - DNA, 73 bp, Glycine max
  Clone ID: 701101967H1
ggtcaaccacatgggtatccctcactttctcgttataccatatccagttctgggtcatgcgaatccccttatg

SEQ ID NO: 23636 - DNA, 265 bp, Glycine max
  Clone ID: 701101968H1
gttgttgaaaagaaaccctagcaagtggagcaatggcagacgttgaagtcgatgtggcggcagcagcagcagcagggctgccgaagaagagaacgttcaagaagttcagttttcgaggcgtggatctcgatgcacttctcgacatgtccaccgatgaactcgtcaagatgttcagtgcccgcgctcgtagcaggttccagagaggcctcaccagaaagcccatggccttgatcaagaagctccgtaaagcgaaaagggaagctcc

SEQ ID NO: 23637 - DNA, 254 bp, Glycine max
  Clone ID: 701101969H1
ttcaaagattgcagtatgttgcatttacttcattgttaggatttgcattgtgcatcacatggaatattgtagctggtcacttcagcttggattaagggagaaggagtgaaaatatggtttcttgctattatctacttcatagcaggaattcctggagcatatgtcttgtggtatcgcccattatatcgtgcttttaggactgacagtgctttgaattttggatggtttttcttgttttacctgcttcacctagg

SEQ ID NO: 23638 - DNA, 62 bp, Glycine max
  Clone ID: 701101970H1
gccagcaaacggaaaagtctttgtgatcttttttctacagattgtacaaaaacagtggctca

SEQ ID NO: 23639 - DNA, 71 bp, Glycine max
  Clone ID: 701101971H1
ctggcatgttgatcaatgataagcaggtctatgtaggccattttctgcgacagccagatagagagaatgct

SEQ ID NO: 23640 - DNA, 72 bp, Glycine max
  Clone ID: 701101975H1
acggctcgagtgaagcttccccgactacagaacattataatgcagcatgttgatcattcagctggagatctt

SEQ ID NO: 23641 - DNA, 258 bp, Glycine max
  Clone ID: 701101976H1
cgcttgctcccacaagagcttagagagcgtgtgagacgatatgatcaatacaagtggttggcaacacgtggtgtagatgaagaaagtttggttcagagtttcccaaagggtcttcgaagagacattaagcgtcacctttgtctggctctagtgagaagggttccactatttgagagtatggatgagagattgcttgatgccatatgtgagagactgaagccatggttatttacagagagtacttacattgttcgtgaa

SEQ ID NO: 23642 - DNA, 262 bp, Glycine max
  Clone ID: 701101978H1
ccccacggggcaaattgagttgggtgttggaaaggcagagcaagcctagtaacataatcaaacatggcggttaggcaaagagccgtgtctggacttccaactcttctacgcactctccgcaaagaacctttgaagcctcgcaaccacgcacacgtcaatgccttggcctctcttcgacgcgacttctctttgtacgatcagctcaacctcatcgatcaagtccccgcagaccagctccgatttcaagggttcctaccaaccc

SEQ ID NO: 23643 - DNA, 263 bp, Glycine max
  Clone ID: 701101982H1
cttgtttcttttaagatatttttggtcacatagtttatggtctgcctctgcgtagtgcttcaacagccccctgctcgctcgatcatcttgattattttttaagccttttaaatgcccaacatcttgttcttgatgtttgagattgatgtatccaattcttagtgaaatcttcttttccgggtgtatgatcaattctactgtgagacgacgcaggacccatttagttcaatccttctccgttgcttttctttactggctctact

SEQ ID NO: 23644 - DNA, 260 bp, Glycine max
  Clone ID: 701101984H1
tgacaatcttgagggctactacagccctatagatcaggtggaacagaaaccactggttaaccagtaagttaaccgtgccccgtttgctggaaatggagcttcaagtctcacctgttactccatctgctgatgttactgcttacttcagctctgagcattcgagcagctcgtttgattattcacgacctcggatggggtgaacaagtccccaagacacccgagatctcatccatgctttctgctgctcctttggacggtga

SEQ ID NO: 23645 - DNA, 73 bp, Glycine max
  Clone ID: 701101985H1
cgagaacagcctagtcttcggtgacaagccagtcactatttttggacacagacaccctgaagagatcccatgg

SEQ ID NO: 23646 - DNA, 259 bp, Glycine max
  Clone ID: 701101986H1
ttaaggatgctgctatggggaagaggagcaagattacgcgcgatagggatcgtgatatcagtgaaaaagttgctcttggtatggcttctaccaagccgggtactgaggttatgtatgatgagaggctgtttaaccaggataagggaattgcgtctgggtttgccactgatgatcagtacaatgtgtatgagcatgggttgtttactgcgcacccacaatttccacattgtataggccgaagaagaatattgatgatgag

SEQ ID NO: 23647 - DNA, 134 bp, Glycine max
  Clone ID: 701101987H1
gttttgatagagctcctcctgttccttttgaggaaattgaatctatattgcgcaaggaattaggaaagccattagaaagtgtctatgaatacattgacccaacacccattgcacctgcgtctatagcacaggtt

SEQ ID NO: 23648 - DNA, 133 bp, Glycine max
  Clone ID: 701101989H1
actcgagccgcggaacgttgccacaaacgttgttgttttcagatacccacgtgactatgtacctatcaatctccatctctgagttcaaccgaaccaaactcgcgaagctatggcagaggtccaaaccaaggtt

SEQ ID NO: 23649 - DNA, 271 bp, Glycine max
  Clone ID: 701101935H1
ctattctctcgcattccgtggagatctagtgctcctgctgcaagacctcgctgaaaattagggtttcgattcggaggtagacgaagatgttcggaagggctccgaagaaaagcgacagaccaggtactacgaaatcctcggcgtttccaagaacgcttcgccggatgacttaaagaaggcttacaagaaagccgccattaagaaccatcctgacaaaggcggggatcccgagaagtttaaagagcttgctcaagcctatgaggttctgagt

SEQ ID NO: 23650 - DNA, 257 bp, Glycine max
  Clone ID: 701101990H1
ctctttattattccttccttccttcttcgcatcaacaaaccctaacatagcatcctaagatacagagactatcaccatcgtcctgctcatttggcacatgcttctccccctgaatactttgtccgcctggagaacacaagttacaaagacgatctatatttaaggaagatgacaaggatgcgtcggtggcgttgttgtacttgtcacgtggaagagtcttacccatcagatgaacatgaacactgaaaagccaagga

SEQ ID NO: 23651 - DNA, 255 bp, Glycine max
  unsure at all n locations
  Clone ID: 701101991H1
actcgnaccgattcggctcgagacataatactactacaagagatgactttctgcaggttttctacttcttcaatcagtgtctactacctgcgggttcttcttcttctccttcacccttctcttctgcttcttctccttcctcgtcttcatctccaggatgaagccctggtgtaactgcgatctttgcaagagctacttgacggtgagttggctgaaaaagttccccaatctctgcgactggtagactcatctctt

SEQ ID NO: 23652 - DNA, 247 bp, Glycine max
  Clone ID: 701101891H1
cgccttatcgctgtggttatcatcttcttcttcctctttcttagatctcttctttctctacgccgcacgccgaaaccatggccggacacggcgcgggtcctgctctcggcatcgatctcggaaccacctactcttgcgtcggtgtgtggcaacatgaccgcgttgaaatcatcgccaacgaccacgggaacagaaccacgccgtcttacgtcggattcactgacaccgagcgtctcatcggtgatgc

SEQ ID NO: 23653 - DNA, 248 bp, Glycine max
  Clone ID: 701101892H1
ctcaccactttcaatatctcagtagttgtgcatggtactgttgctgagaagacattaaattgtgaattagatccatatgaggtccctaagagcatgggcatattccacttgctcgaaagcccaaaagatatcactactgccacagtagcccaaaggataatggctaatcatgaagcttatgtgaaacgcaatgctaagaaaactaggcgtgcgcagagatactacgaagagaaaaaatacgtctctgg

SEQ ID NO: 23654 - DNA, 229 bp, Glycine max
  Clone ID: 701101894H1
gtcgcactttgcgttttctgcgtcatctccgattccccgacaatggccacccaaatgagcaagaagagaaagttcgtagctgatggcgtgttcttcgctgaactgaacgaggttctgacaagggcgttagccgaggacggatactccggcgtggaagttagggttacgccgatgcgcaccgaaatcatcatcagagccaccagaacccaagccgttctcggtgagacgg

SEQ ID NO: 23655 - DNA, 244 bp, Glycine max
  Clone ID: 701101895H1
cttggtctatcagtattcttcctgactgcaaaactgttgtttacaacacagcaacggttggtaacagctggctgaaaaagatgactccagtcaacagtgcatttgcttggcagtcatacaatgcagaacctgcctcatccagtcaagctgattccattgccgcatcatgcctttgggcgcaggtccacgtgacccgcgattcctcagattatttgtggtatatgcccgatgtctacattaatgc

SEQ ID NO: 23656 - DNA, 249 bp, Glycine max
  Clone ID: 701101896H1
cggcttgagctctgcgagatcttgagtcgccgatttgaaaagatgcgtaagcttcagagtgatgctttgcgtgaagccatctcaggaatcatggccgattgcaaggcgaagaatcgcaaatttgtggagaccatcgaactccaaatcggtttgaagaactacgatccacagacggacaagcgtttcagtggctccgtcaagttgccccacatccctcgccccaagatgaaaatttgcatgcctggtgat

SEQ ID NO: 23657 - DNA, 277 bp, Glycine max
  Clone ID: 701101901H1
aggctcgagcgttggttcgcaacaatggcgatgaggagattctacaacgagatcaagggaccgagggtgagcgaggttccggagcacgtgaagccgatgctgtcgctgaactacatcaagaaggcgattcagagaggcttcgataattaccatgccaagtacattgaaaccagctcccccgatcccatcttccatgtctgctacggcggcatgatcttctcctacctcgttgctctcccccacgagcgccgccacctccagcacgcccagcagcacc

SEQ ID NO: 23658 - DNA, 82 bp, Glycine max
  Clone ID: 701101903H1
cttgatttggaaaaaatagccaaggatactcatggttatgttggtgctgatctagctgctttgtgtactgaagctgcacttc

SEQ ID NO: 23659 - DNA, 83 bp, Glycine max
  Clone ID: 701101904H1
acgtgggtgctctggatcacatctctgagctctttgactgctcccataccagctccaagctcaagaagaagcgcaaacaattc

SEQ ID NO: 23660 - DNA, 77 bp, Glycine max
  Clone ID: 701101905H1
ggtacaacaactttagtggaccgctacctacagatcttgggagtaatattccgctggcaatcctcttgctggacaac

SEQ ID NO: 23661 - DNA, 82 bp, Glycine max
  Clone ID: 701101906H1
aagcgtcgctccgcaccagtttcaccgcacgaatatattgttgtttggagcgatccgagaaaaactctgtaaacatgttggt

SEQ ID NO: 23662 - DNA, 270 bp, Glycine max
  Clone ID: 701101907H1
aagtgaatgctaagggtaaacccgaatatgttctaaagcgagctgaagatctcgcagctgccggccaaaaggcagaagcagtcgatttcctctatgaacaggttacgtcaaagagaaatcgtacttggagcaagatgagcgagaagattatggtcaagttcatcgagctttgcgttgctctccaacgcggcaagcaagccaaggacggcttgcaccaatacagaatcatcacacaacagattccctcgtcgttggaagttgtgttgaaga

SEQ ID NO: 23663 - DNA, 81 bp, Glycine max
  Clone ID: 701101908H1
caaaggttcgccagaaaatgcttctatcctcctcctgctccgccgccggctccgccgtctccggcgagatcatgctgttcg

SEQ ID NO: 23664 - DNA, 267 bp, Glycine max
  Clone ID: 701101909H1
cgagccgtgccatttggcacaatgtttgctctgatctttttatggactgggatctcggttccacttgtttttgtgggtagctatgttggattcaagaagcctgcaattgagaatcctgtgaaaacgaacaagatcccaagacagatcccggagcaggcatggtacatgaacccagtgttctcagttctgattggtggaatactcccatttggagctgttttcattgagcttttcttcatcctcaccccaatctggttgaatcagttt

SEQ ID NO: 23665 - DNA, 79 bp, Glycine max
  Clone ID: 701101912H1
tcggcattgagagctggaacagtgtgggtgaactgctttgatacatttgatgcagcaattccccttggagggtacaaaa

SEQ ID NO: 23666 - DNA, 143 bp, Glycine max
  Clone ID: 701101913H1
ggttctagcaatcctcgtgcatagttatctatcagttatatatgggtaagaactttcattattcttaaacaacgccaccgaacttacaatcataaacgttagtttaattaggcgtgcatgatcacatttgtgtattttaaata

SEQ ID NO: 23667 - DNA, 144 bp, Glycine max
  Clone ID: 701101914H1
aatattttggtgctctgtgtctctacgatctggatccaacggtccaaaatgttcggggcttgtgctgcttgttttcccaggttttagagctccaaaccttcagatccacaacattcgtctccagatcttccttccttgataacg

SEQ ID NO: 23668 - DNA, 268 bp, Glycine max
  Clone ID: 701101915H1
actgagcgctggaactttgcctgccctgatgcccccggtggaatcgataacccctaggtcaacccctgtgttcctggggcaccctctttggccactcttgcctgctctaagttgctcgttactatcactggcaaagacgagttcagagacagagatattctctaccaccacaccgttgagcaaagtggctggcaaggtgaacttcaactctttgatgctggcgatgaggagcatgctttccagctcttcaagcctgagactcatcttg

SEQ ID NO: 23669 - DNA, 142 bp, Glycine max
  Clone ID: 701101916H1
gctgagcgtgcacattcttcttcttcttcttgttctctttctctctctgaagcaaatgcagagcaattaataactcaagttttgggtcactgtgaccgtgatgatcgtaaagttattgtcttttgagtgatgggtttgtgct

SEQ ID NO: 23670 - DNA, 270 bp, Glycine max
  Clone ID: 701101917H1
cacatcttttctcctggatgttttaaagccgaatctaccagaacatgggttccttcagacaaaggtgttggagataaatctggtgactttccccaatgttgctgatgcaatattggctaatggcatgttcagccattatgaccgtcctcgtattgcccaactttgtgaaaaagctggcctttatgtgcgagctttgcaacattacacagaattaccagacatcaaacgcgtgattgttaatacacatgcaactgaactcagtcactcgta

SEQ ID NO: 23671 - DNA, 274 bp, Glycine max
  unsure at all n locations
  Clone ID: 701101918H1
cgaaagccatagtttgttacttctcttcgccttttgctttgcaattgtcaccaaacaattcttgcttagctctcacaagcaagcattatcaacaatgaagaaaattgtgttaaaggtggacttacatgatgacaggatcaagcgaaaagctatgaagacagcatctggcctttcgggggttcaatcagttactgttgacattaatgacaagaaaatgaccttattgggggatgttgatccagtgagtgcagtgtcanagctacgacagtggtgt

SEQ ID NO: 23672 - DNA, 267 bp, Glycine max
  Clone ID: 701101920H1
ggacatgcatctatggtggggttcctaagggactcaggtgcgtgatctccagaaaggtgtcgaaattgtaattgccactccaggaaggttaattgatatgcttgagtcaaatcataccaacttgcagagggtcacataccttgtattggatgaagctgataggatgttggatatggggtttgatcctcagctacggaagattgtctctcagattcgtccagatcgtcaaactttgtattggagtgctacctggccaaaggaggttga

SEQ ID NO: 23673 - DNA, 268 bp, Glycine max
  Clone ID: 701101921H1
cgaggattgtgcaagacaaggtgcagtgcccattcaaggccaaatgtgtgcaacagggcttgtggcacatgttgtgtgaggtgcaagtgtgttccacctggaacttccggcaacagggagctttgtgggacctgctatactgatatgaccacccatggtaacaagaccaagtgcccgtaaagcccatagaaggtgagccctatccaattgggcccttcacacaccaagcaaagctagcatagtttagtacataataaatgtgttatct

SEQ ID NO: 23674 - DNA, 269 bp, Glycine max
  Clone ID: 701101922H1
cggaattggaagttgacgagaacgacttgaaagccgccggcgctgaactcttcgccgaaggtggccggcgaggcattcgtatcaatggctggttgatcgagactcggaggcactccatactgaactcttccacattccaagagtgggaacagaaaatcgatacgtctcatttaccagaaatggtttttggggaaaacactttgattctaaaacacttgagccgtggaaccaacattcattttaatgcatttgatgctctacgtggctgg

SEQ ID NO: 23675 - DNA, 77 bp, Glycine max
  Clone ID: 701101923H1
cttttagcaagttaacaacacttttgtcttcgttccattatgtggttctcaattctcttcaccctttgcctctgaaa

SEQ ID NO: 23676 - DNA, 266 bp, Glycine max
  Clone ID: 701101924H1
tgctgtttcaataggggaatacatgctggcttcctggttaggaatgatgccaataacactggcacttgtatatgttggaacaactcttaaagatctttctgatgttacacatggttggggcgagttatgaaagactcgttgggcgtttatcattcttggtcttgtgatatcggttgttctgatgatatgtgttactagagttgccaaggctgctttagataaagccttggccgaaaatgaagatattgatgggattacttcctcgc

SEQ ID NO: 23677 - DNA, 268 bp, Glycine max
  Clone ID: 701101925H1
ctgaagatgatgtccggaaaatatacgtcgattgacgcgcagcagcttcagggatctgttcctgccgttccagattcacgacccgccaccgtcaatttcgcagattcaaatcttcagacatttcctccatctggtcctctgggcaagattactgctgcttccgggcctcctcgtgacgctgatgattcattttcaaaacctgtatctggttctgatgaaccccagcagggtggttggtttcagacttttacaattgctgcttacaaac

SEQ ID NO: 23678 - DNA, 76 bp, Glycine max
  Clone ID: 701101926H1
ctcaagcagaagcagatggatgccactagaattttggcacaaggagtatttgtgttccttgtcattacgtgtgtgg

SEQ ID NO: 23679 - DNA, 247 bp, Glycine max
  Clone ID: 701101890H1
tagagtttaagcagtgaataatgcaccctccttgatttgtaaggattatatgttatagactagagaataaattactatgtagagatcttaatctatctggttcagagaaagcagcgatttgactaaaaatcttgagcattgttgcttattctagaatctagatttagttgttagattttgtttttgtagctcctccgtgaatgatgagaaaataagagttttgatgtgataatcttaaacaggtgtg

SEQ ID NO: 23680 - DNA, 141 bp, Glycine max
  Clone ID: 701101928H1
cacaccccacttctgaatcacatcatgtcttcaatgttcaagtatgggactctcccaagtctgaggactctcaagagagcaattgcagaagctccaccattaaggaaccaagagggtgctacaagagaagaagaactgaac

SEQ ID NO: 23681 - DNA, 140 bp, Glycine max
  Clone ID: 701101930H1
ggttcatcgccctcaatccactttcaattacctatgcaggttaaagcctccatctgaatcccttggtgctgcttctttagccctgcactatgcaaatgttatcatcatgatcgagaagttagcagcatctccatacttga

SEQ ID NO: 23682 - DNA, 77 bp, Glycine max
  Clone ID: 701101931H1
gttggccatatctgtgttgagctctctccttctgacaacctcggcacagacagcatgcaagggccaggccttcaccg

SEQ ID NO: 23683 - DNA, 76 bp, Glycine max
  Clone ID: 701101932H1
ccttggctggttactctaaaattgactcagagcacatcatggttttcgttgggtaggggagtgggcaagcactggt

SEQ ID NO: 23684 - DNA, 273 bp, Glycine max
  unsure at all n locations
  Clone ID: 701101933H1
cactagttctagatcgcgagcgatctagaactagtttctgcttgatcngtttccttttcaagagcttgtctggtttcatagtcttcttctacgctgggtgaactactgatttttgtcactcaggctcctgtaaattatgtttctctccgttgtgtaaaacctagtttgaggccactgtctatggctatatctactgtttcaatccatgtctttggtgatgtgccttcctcaccacttgttggggtcctgcaggatcatatcaacgactggagg

SEQ ID NO: 23685 - DNA, 245 bp, Glycine max
  Clone ID: 701101864H1
cggcgctggcgcgtggcgggcactccaacgaaggttctcgaagaatctctctggctgttggcggcggcagcgttcgggcaagtcgtggtggatttgggcgaattttccgcaatttgtttgggcgccttggggctttgactagaagccgtagcctttcaacttcactcttcaatagacgccgcagtactagaacctgggtcttgggaaattgatttggatggcgttggttttggaaaacaagcttt

SEQ ID NO: 23686 - DNA, 257 bp, Glycine max
  Clone ID: 701101865H1
cgcacgtctctctctctctctcgccatggctatggctatgcaaagcggaatcggagtctccaagatcctcatcatagcaggcgcaggttacaccggcaccgtcctcatcaaaaacggaaaactctcggatttaatcggcgagcttcagttgctggtgaagggcttggcaaaatctggggcgcatgctgaaggtgaaggtgaatatgctgatgccatagctgctcaggtgcgtcgcctggcgaatgaagttcggcagc

SEQ ID NO: 23687 - DNA, 254 bp, Glycine max
  Clone ID: 701101866H1
ctcgagccgttcctccttaatttgaggttaatattcccaaaagacgcgagagcgagcgtatcgctcatccttattacaaggactgggcacgttaagcttcacaattcattcacattcacattgtagctccgttaacaagattcactttcatctatccactcactaacgtgatcacacactcatcatcatcaataatggcggagttgttggcaaaggccaaaacatatgttgcggagaaagtcaccaacatgccc

SEQ ID NO: 23688 - DNA, 254 bp, Glycine max
  Clone ID: 701101867H1
tgggaccaatcttctcaaactagggcataatgagagagaaagacatttacttggaagtgatggggtaaatggcaagatgaatctgaagcctattatatatttccagagttggagaattggcattgtatttttctttcttggaaattgccttaatttcatttcctttgggtacgctgctcagtcacttcttgcagcgctgggatctgttcagtttgtatctaacattgccttcgcttactttgtcttgaacaaaa

SEQ ID NO: 23689 - DNA, 253 bp, Glycine max
  Clone ID: 701101868H1
cggctcgagattggactgggaagcaattgggaaaattcttgcacgaggtcatagtcgtgttcctgtatacagtggaaaccccaaaaatataattggcctcttactagtaaaaaaccttcttactgtaagagctgaaacagagactccagttagtgctgtttccatccggagaattcctagggttccagcagatatgcctctatatgatatcctcaatgagtttcaaaaaggcagcagtcatatggcagctgta

SEQ ID NO: 23690 - DNA, 252 bp, Glycine max
  Clone ID: 701101871H1
ccctcgagccgaatcccctcgagccgctcgagcggctcgagctctaacctaatcaaatcctctcacctcaaaccaattcccactactcctctacacgcctcccctcaggaaccaatgtccataatcaccccacgccgtcatcctcaaacgacacccttccgctagcaaaacgactgcggtttggtcgtcgtcttccccgaggcatgctcttgggatattattcttcatcatcgtaatcacaccctacagaga

SEQ ID NO: 23691 - DNA, 249 bp, Glycine max
  Clone ID: 701101873H1
cttgaatatctctcacaacaacctgtcaggttctatccctgactcccttagtgaaatggtgagtttgtcagccatcaacctctcctacaataatttggcgggtccagttcctgacggtggcgtattcaattcttctcatcccctggatttgagcaacaacaaagatttatgcgggcatattcaaggtttgcgtccatgtaatgtttctctcactaaacctaatggtggatcaagtaacaaaacgacggt

SEQ ID NO: 23692 - DNA, 245 bp, Glycine max
  Clone ID: 701101874H1
ctcgagccgctaacctccagcatcctttggtttgcattgatgttattgaagcaggaatagtagctggtcctcgtgcaggactttggaaggcagctgaagcatttgacggacttgtaaggtcagatacttgcaaaagcttagttcacgtattttttgctcaaagaggaacatccaaggtacctggggttcaggattgtggtctggctccaagacaagtcaagacggttgccatcattggtggcgga

SEQ ID NO: 23693 - DNA, 248 bp, Glycine max
  Clone ID: 701101875H1
cggttgagcattacatgcgcaaatacactacaggggctcgcgtgcgtgcgagtacttgtggcaacaaatgcaccaaggcttgcacgtgtgtgggttctttctaccacacggcgaattcacggtgttgggtcgcttatgatcttcaaacccttatcagcggggccaattcctcacatgtggggtatattacggtgcctaataagtaaaatattaaacccttgatattgcggttttatacagttttactt

SEQ ID NO: 23694 - DNA, 247 bp, Glycine max
  Clone ID: 701101876H1
cgggacagaggagctctcgttgagttctatgctccttggtgtggacactgcaaaaagcttgctccagaatatgaaaagcttggtagcagcttcaagaaagccaaatctgttttaattggcaaggttgactgtgatgagcataagcgtttgtgcagcaagtatggcgtctctgggtacccaacaattcagtggtttccaaaaggatctcttgaagccaaacagtatgaagggccacgcactgctgaat

SEQ ID NO: 23695 - DNA, 248 bp, Glycine max
  Clone ID: 701101877H1
ccctcctctcactttcatttctacatccctggctctgttccgtcgatgccgatggcgtttcgggtgcgaaaccctgacctccgctttctcattcttctctctctcttgtccatcacttccgccaaggtcttcttcgcggcgcgtttcgatgacggatggggcaatcgttgggttaaatcagattggcaaacagatgagcacctggctggggcgtggaaccacacctctggccaatggcatggcgacgc

SEQ ID NO: 23696 - DNA, 244 bp, Glycine max
  Clone ID: 701101879H1
cttcttggacgctacgcggcgccggcgccggcgccgattggtggtggcgtggcggcgtttgtttacacgtctatgcttgaaaaccctaagcatccttatttttataccgttagcttaatcggaatcgccgtcgggaaacggactattccggcgccggagctgctacggcgggtgcacaatcgaggtgacggcggcgtggttgtggcctccggcacgacgttcacgatgttgccggcggggtttt

SEQ ID NO: 23697 - DNA, 246 bp, Glycine max
  Clone ID: 701101880H1
caagaaaaacacactcacacacagtgcttgtttagactagtgatcttccatggctgtgaaggatagaatcctggtcttgggacccacaggcgccattggccggcacatagtttgggcaagtttaacggcagggcatcccacttttatattggttagggccacccctgcctctgttcacaagccaaggcttgtcactgctgctaatcctgaaaccagggccgcactcattcagagcttccaaaattc

SEQ ID NO: 23698 - DNA, 259 bp, Glycine max
  Clone ID: 701101881H1
cgctcgagccgattcggctcgaggcaggatcattccaatatgggcaaacgaattgttatgggaactctcccttctctttatctctactcttcatcttcagctttagtttcttggaggctcaaaaggctccagcagtttatgtgtttggcgactcacttgttgatgttggcaacaacaattacttgagtctctccattgacaaggcaattcttcctcactatggcattgattttccaactaagaaacccactgggcgatt

SEQ ID NO: 23699 - DNA, 253 bp, Glycine max
  Clone ID: 701101882H1
gtttattccttctttcatccattctactttcttttcctctcgctagtgtttagtgctaggtgattgattaacttagaaggactttgtgtgttacaagaaaacaagggcaagtttcatgtctgaatttgacacgaacatcccaactgcttttgatccctttgctgaggcaaatgctgaggactcaggtgccgggacaaaagagtatgttcatgttcgtgtacaacagcgcaacggcaggcaaagcctaacaact

SEQ ID NO: 23700 - DNA, 252 bp, Glycine max
  Clone ID: 701101883H1
tgaaatctgaagctaagtttcgttgccactgaggaatgaaatggccaatggtaacaacattagtcatttcttcaagctcttgcttttccttctaactttccactcttgtctcgctgagattttcttccaagagcgattcgaagatggatggcagagccgttgggtgctatccgattggcaaaggcgcgcgggaaaagcgggtaccttcaagcacacagcagggaaatggtctggggatcctgatgacaaagg

SEQ ID NO: 23701 - DNA, 253 bp, Glycine max
  Clone ID: 701101884H1
caagtcccctattacattacaattcaccattaatattctcttcatcatatactttcccttgataataatttcttggttacatcaaggtacatattttctgttcattcattaactcatctgcaaacatggccgataagcaaccccacttgaacggcgcttattacggtcccgccattcctccggcggagcaaccacgctaccgccctcacagtcaccgcggaagaagctgctgttgctgcctcttcggaatctt

SEQ ID NO: 23702 - DNA, 252 bp, Glycine max
  Clone ID: 701101885H1
gtttcttttaagatatttttggtcacatagtttatggtctgcctctgcgtagtgcttcaacagccccctgctcgctcgatcatcttgattattttttaagccttttaaatgcccaacatcttgttcttgatgtttgagcttgatgtatccaattcttagtgaaatcttcttttccgggtgtatgatcaattctactgtgagacgacgcaggacccatttagttcaatccttctccgttgcttttctttactg

SEQ ID NO: 23703 - DNA, 250 bp, Glycine max
  Clone ID: 701101886H1
ctttaagagtagctctaagaagaagaaaaacaaatatgaaggttgtgtacttccttgttgccatcttggctttgacatcctctcttgtctctgcctctgaccctagtcctcttcaagatttttgtgtggcagccaaagaaaaagctggtgtatttgtgaacggaaaattttgcaaagaccctaagcttgtcaaacctgaagatttcttcctacatgtggcaaccgggaacactgacaacccaaataatgc

SEQ ID NO: 23704 - DNA, 250 bp, Glycine max
  Clone ID: 701101887H1
cacgattgggattcagctctttgctctatggcagccgaactacgtgtgctaacttcaactttacctccgctgcgtagaaggcaaacgtttcaataattagcattatctcattctctcattcataataaatgccgcctgcggaatttaggttgagcttcgcaactacgagtttcaaataaactgttaaacacaagtattttctatttccttttgatacatacagggttcatgtttttcactttggataagc

SEQ ID NO: 23705 - DNA, 242 bp, Glycine max
  unsure at all n locations
  Clone ID: 701101888H1
ccgcaaactcattctctctgcgacaggcttttccttctctccaagatggtcggcgaacacagtacgacgtcaccagcctccggtgatcacaaaataccacttcttcccgttcacgagccagtggcaggaanacatacaaacatctccttcagcaccaaatcgattccaacactacaaaacttctacgtgattctgggacctatgctgtctcttttcatatgcctcttcgtgaaactcgacgc

SEQ ID NO: 23706 - DNA, 249 bp, Glycine max
  Clone ID: 701101889H1
ccagtatggagatcccaagcaccgcaacactgatgttaagacggctcttgaaagtgctattgagcagaatatggtggtgaaacagaatttaggtgctttgccgttgtatgttggtaagaatgataaactttggaaatgtgtaaatcctttaggtggtactcctaagcagcactcaaaagcacacatgggatgaaattgacaagtttttaacaactcctgctggaagatcagcactaatgggtacacagt

SEQ ID NO: 23707 - DNA, 246 bp, Glycine max
  Clone ID: 701101863H1
caaacgatacgttttttttggacaagatgatgggacccgcaaatatctttattatttttttgtcgtaaaagtcagcatttgtgtgcaattgcattgcacctaacattttgtggactaggccaagcttagtaaactattcttattctttgttctagagagatcagggcatgtggaattcggttgccctgcgctcgtatttggcttggctcttggtgtacagcgaacaaaaaaaaaccgggggcccgg

SEQ ID NO: 23708 - DNA, 256 bp, Glycine max
  Clone ID: 701101837H1
gttccttctccttgtgatcttcttcaaccttcagcgtgagaaaacacattcagaaaccacgtttctctcttcttcttcttcttcttctttttcttctctcgaggtcattattaagtattcaccatggcggcaccatctcccaccaaacccaacgacccaacaaaaccttccaacacttccaccacccttagtctggaggccggcccggcccaagccagcccactccgaaacatgtttgccgtggcgtccatcgccg

SEQ ID NO: 23709 - DNA, 252 bp, Glycine max
  Clone ID: 701101838H1
gaaagttagaaaacatggcagcggtggccggagcatcctcgtccgtgattaaggtggctgcactttccggatctttaaggaaaggctcttacaacagagccctcattcgttctgctattgagctaagccaaggtcgagttgaaggccttcaaatcgagtacgttgatatttcgcctttgccccttctcaacaccgatcttgaggtgaatgggacctaccccccacaagttgaagcctttcgccagaagattc

SEQ ID NO: 23710 - DNA, 252 bp, Glycine max
  Clone ID: 701101840H1
ccctcgcggcgaatcggctcgagcggctcgagttttgctttctcttccctctcaattttctctaggtctctctttttatttttacgatctctgacctaattgtctctcttctcttctcttctcatattaccactcatctccagccacaacccagagcacaccccccaaaattccgtgggtatttctcatcttcttctgcccccatcacctagatctgtctgtctatacactcattgtttgacaaacaaagaa

SEQ ID NO: 23711 - DNA, 249 bp, Glycine max
  Clone ID: 701101841H1
ccacaattcacaatcaatcacatttcacaggcatgtcttttcaacaaagttcattctacccacgagtcgattcaacaaacccagacgctaattctcccttctctatccccgcaccatcttcttcttcttcttccatttatccctcagtggccccaacagcgcatctcatttgggacgcgccaaacacgactacagaagacgccatggcaaacgttctggtcacggtcccgggtgcgcttctgcatctga

SEQ ID NO: 23712 - DNA, 249 bp, Glycine max
  Clone ID: 701101842H1
caaaagcaaaaggcaagaatatcaacaaggtaaagtagattccttactagacatggcgttgaaggacacattctacatatctcatggatcaccaactttgtccatagatgaatccattcaggccaggcagttccttcagtcatggaagacggacgtgtttcctcaaagaccctcttcaattcttgtcatctctggtcattgggaaaccgcagttcccacggtcaacgtcgttgactccatcaacgacac

SEQ ID NO: 23713 - DNA, 250 bp, Glycine max
  Clone ID: 701101844H1
cgggaatcgcttgggccttcggtggcatgatcttcgccctcgtttactgcaccgctggcatctcagggggccacataaacccggcggtgacatttgggctgtttttggcgcggaagttgtcgttgcccagggcgattttctacatcgtgatgcaatgcttgggtgctatttgtggcgctggcgtggtgccgggtttcgcggggacaacaaaatacggtgcgttgaatggtggtgccaactttgttgcccc

SEQ ID NO: 23714 - DNA, 251 bp, Glycine max
  Clone ID: 701101845H1
cgcgcttacgaaaatgtggcagagaacgggttttgaagcagaagcagttcacttgatcaactcagatttcagggacctaagtctagctgctaatagactcgcccatcatgccatcaaacttggtggcattggctttggagcctcttttttcggattgtttgctgccattgctgctatttatctgttgattttggatcgtacaaactggaaaacaaatattctcacagcactactcattccatacattttct

SEQ ID NO: 23715 - DNA, 246 bp, Glycine max
  Clone ID: 701101846H1
gcgatccgcgacaaactctgtaaacatgttggtttaccaggacctccttacaggtgctgcgcttctctctgactccttccgttacacggcaattgcgcatggcatgctgtgggccgctgcggggccgtgggttgttaacggcgcagttgctgtcgacattggtgcaaacccttctgctgcgggtggcggcgcagatgcgggcgttgatgatgcagctgttacggttgttgacattgttgacacatt

SEQ ID NO: 23716 - DNA, 249 bp, Glycine max
  Clone ID: 701101847H1
gcattatatatattttgaatataagacattaagaacatgcttgagaagcaaaaggtggttggttgtaaagtgtccattgtcattgtcttttccttttatgaaaagaaaaaaaaaaaactttactagacatgaaaaatttgttatatataaatagttactgatgaatcttctagttttgcaaagcctgaagaatttaaatattagacgtgcaattggcgtcagaaacgctgcattcttgtccattactct

SEQ ID NO: 23717 - DNA, 258 bp, Glycine max
  Clone ID: 701101849H1
catcagtgcttgaagatatcattagttgctgtgttagtaaaggatatgtctttcaaatggaaatgatagtacgggcatccagaaaagggtaccatattgaagaggtcccaatcacatttgttgatagagtatttggaagttcaaagcttggtggatcagagattgttgaatacctaaagggcctagcttatctcttggtgacaacataaaaggataaatcataacaactcgatataccttacattttggggaagaaaa

SEQ ID NO: 23718 - DNA, 257 bp, Glycine max
  Clone ID: 701101850H1
ccgtcgagccgaatcggctcgagccgaccgatagcgaacgagtaccgcgcgggacaggtgcagaccagtatttcatgcaggaaaccgacaaggctttggagacatatcgggcggggttgcaatatgactctaacaaccaggagttgcttgacggcatcagaacatgcatacaacaaattaacaaggctcgccgtggagacttaagtcctgacgaattgacggcgcgacaggccaaggcaatgcaggatccagaaatt

SEQ ID NO: 23719 - DNA, 259 bp, Glycine max
  Clone ID: 701101851H1
cgctgagttactacaatcagcagcaaccacccgtcggtgttcctcctccccaaggttacccaccgccggattcttacggaaaggacgcgtaccctccgccagggtacccgccgcaaggcggataccctccgcaggcgtatccagcacaggggtaccctccaccctacgcgcctcctcagtacgctcagcctccgccgcaacaacaccagaattcatctggcccaggttgcttagacggatgtttggctactctctgctg

SEQ ID NO: 23720 - DNA, 256 bp, Glycine max
  Clone ID: 701101852H1
gcttcgcgttcatcactgggcagtaaaaaatgtctgacacagcagaccatgcagcatcagagtattccaatggtgacgaatcccctccaaagcccagacagaggttcagggacagatctaaggcgatgctgtccaaacaagctgtgcagaccaagcaaatgctttccaaacaggccgttaagcttgccaaacaagctgaagaacacgaaaggttcatcaacaaggtgacgcatctcgtgggggtcctcggttttgg

SEQ ID NO: 23721 - DNA, 256 bp, Glycine max
  Clone ID: 701101853H1
cttgttttgtcatctaagacaacctagtgagagtaagcacacattgctcagcaacaatggcagcctactcaagccatgctttgaaaaccatccctttttcttcctttgtgaagcctgtcagtaccaaaccaacatcattcttcacaccttcacctaccaaacctttcttacccttcacctcaccaaaccactctctcaccaaaaatctcaagctgaactccactttgccacacttttgcttgtcttcagttcccaa

SEQ ID NO: 23722 - DNA, 249 bp, Glycine max
  unsure at all n locations
  Clone ID: 701101854H1
cgcacagttcctcaagtatccaccacccanagtgctccaggtggataagtctgnatagatgactgatgaagtctttgcaagaccaacgattgctggtttaaatccaaatgtcattaagattatcgaggagttcccactaagtagcaagccagatactcaagcctatggtgatcatacctgtataatagcaaaagaacatttggagcctaacttaggtgggctcactgttgagccggctatccaaaacaa

SEQ ID NO: 23723 - DNA, 253 bp, Glycine max
  Clone ID: 701101855H1
cgcgccgcgatggcggtggccgcgtccgacgccgacgacatcctgatccgtcaggtggtgccagatgttggcgaaccggcgcggcggacaacctgctgaacgccgagcaccacttcgcgagcttcaaggccaagttcgccaagacctacgccaccacggcggcgcacgatcatcgcttcggcgtcttcaagtccaacctccgcagagccaggctgcacgccaagctcgacccctccgccgtccacggcgtcac

SEQ ID NO: 23724 - DNA, 250 bp, Glycine max
  unsure at all n locations
  Clone ID: 701101857H1
cgctaaaacatctcaatgggttcttcttctattacaacatcgcccccaancatgaccatggctgcgatcgtgctcctgttcacggtctttgccgtttcctccgccctagacatgtcgatcatctcgtacgacagcgcccacgcggacaaggccgccacgttgcgcaccgcggcggagctgatgtccatgtccgcgccgtggctcgtgaagcccgggacggtgtaccacgcgctcggcgcgacggcgaagc

SEQ ID NO: 23725 - DNA, 248 bp, Glycine max
  Clone ID: 701101858H1
gttcgatgcactataacatggggcagcaagttggctttgaggatgttctaagatactttgacgaagatggtgatggaaaggtttcgccttcagagctgaagcacgggctcggcatgatgggtggtgcgcttccaatgaaggacgctgcgatggcaattgcggcattggattctgatggcgatgggttgccgagtttggcggatttcattgctctcatggaagctgggggcgcggcgcagaagttgaat

SEQ ID NO: 23726 - DNA, 249 bp, Glycine max
  Clone ID: 701101859H1
cggcgccgaagtggatggtggcggctgcggcgacaacggcggcgaagcataatgagaatttgagcagcgaggggcgtttggaggacgatgattcgtggagagtcagaatcttcaatgggcgcaggggccagtaggggcggatcgtgttcgtgtcgtggtgtttgaggaacacgattgggtttttgtggggacctatgatggtttcagtggacctgatgtacttgattaccttctctccaatctccacac

SEQ ID NO: 23727 - DNA, 246 bp, Glycine max
  Clone ID: 701101860H1
tctgaattgatacaaagcgtgcgagcaatagctggcgataagttgctagttgcggccatcaaatcttatagagacaacaagcagaaaccaagctttctacaatcaaggtcaaagaatggcttagcaacgcggataaaataactttcttcacacgagttctttttcttgggttgacataatactaaatacccaaacttacaaggcggacacacaaaactgctttaaaagcagtgtggcatatttgac

SEQ ID NO: 23728 - DNA, 248 bp, Glycine max
  Clone ID: 701101861H1
gtgacggcgttggtgaagctcgtcaactaccagcacctcatgcccacgcgctacacgcttgacgtggacttgacggacgcggttaaccccgacgttctcaacgctaaggctaagacggccactgctctcaaggcgaccaagaagctgctcgaggcgcggttcaaaaccgggaagaaccggtggttctgagcggccagcatacatgttcaccaatgaccaaaggcaacaagaacgaactgggcgatatg

SEQ ID NO: 23729 - DNA, 251 bp, Glycine max
  Clone ID: 701101862H1
cggttcttccacgtaacgcgattttcggtgcacccgcgtggtactttttcagccccagcgacaggcaatacccgaacgggtctcgacccaacagcgtagctgggtcgggttattggcaagccaccggaaccgacaagatcctcaccaccgacggtcgaaacgttggcataaaacaagccctcgttttctacgttggcaaagcccccaagggcaccaaaaccaattggctcatgcacgagtatcgcctcctc

SEQ ID NO: 23730 - DNA, 259 bp, Glycine max
  Clone ID: 701101836H1
ccctcgagccgaatcggctcgagatcgtattctgcaaattcaaaccgacgtcttggttttctgaacgatgggcggtggcacggcaccgcatcatgatgaatctgacaaaggcattttttcacaccttgctcatggggtcgctggtgcagcacatggtggacatgggtacccacctggggcttacccaccaccacctggggcataccctccacaacacggatatcctccagctgggtatcctccacaacaagggtatcct

SEQ ID NO: 23731 - DNA, 246 bp, Glycine max
  Clone ID: 701101803H1
ctcgagccgcgcgcactctctctttttctctctgttttttgttctctcttcgcttaaaccctctcgttcttctcgttttcgccgattctcgccatgccgaaagctaaatccgacgccaaagccgccgatagcaggttgacgcggccgggcgctggtgctgggcggccgcaatcgaggcaagctgctaaggaccctaacaagccgaagagacctccaagcgctttcttcgttttcatgtccgagttc

SEQ ID NO: 23732 - DNA, 255 bp, Glycine max
  Clone ID: 701101807H1
cggggggataagacgacttgtcggagagtgagtcgggtgtggtcggcgaggcaccaccaccaccaacaagcaaatggctgctaccattggcgttggcgccgcaaaagccatatcaatcgcaatagcagttcggcacctccgaacaaaaccttacgcagcagcaacaacaacagcacttgctcttctttcactccacaaacctctcttcctccctcattcctctcccttctcctctcgccgcgctttttgcgccgc

SEQ ID NO: 23733 - DNA, 254 bp, Glycine max
  Clone ID: 701101808H1
gcgaaatggctaaagatgttgaggttcaagagcaaggcggcgagtactctgccaaagactaccatgaccctcctccagcacctttgttcgacccagaggcgctcacacagtggtccttctatagagccctcatcgctgagttcatagcaacccttctcttcctttatgtcactgtgctcaccattattggctacaaaaggcagactgatacaacggtaggtggcaccgactgtgatggggttggcattttgggc

SEQ ID NO: 23734 - DNA, 247 bp, Glycine max
  Clone ID: 701101810H1
ggatgccttggcgattacaggcgacgaaggacgtgatagcctgcgataagcttcggggagctggcaaattagctttgatccggagatttccgaatggggaaacccgaccgtaaggtcatcgcatactgaatacataggtatgcgaagcgaaccgggtgcactgaaacatctcagtagctcgaggaaaagacatcaaccgagattccgaaagtcgtggcgagcgaaatcggagtagccctcgcgtttt

SEQ ID NO: 23735 - DNA, 249 bp, Glycine max
  Clone ID: 701101811H1
ctgctatcttgtgcagtgcagagtttgttgtgaaacacaatttgccatcacaagctgttgacattcttgctctgacaatggccacagacactgaaacttctttcaaggacagctgtatcaagatggctggttttgacatgcgcaaattggctgcagataaagcttacaagattgctggcgtcaccgctaacgatgttcaagttattgaacttcacgattgtttcagtgcaaacgaactcgttacatacg

SEQ ID NO: 23736 - DNA, 251 bp, Glycine max
  Clone ID: 701101813H1
gcaattgcctctttcaagacgcatctgcgtgtttactattttgtactatatttatatatagtcactcaagcttctaggatttctgcctgctgcatccaaatgggcagcaacttgcggtttttgagtctttgcctcttggcattgattgcatcaactcatgctcaacttcagcttggttttcatgctaacagttgcccaaaagcagagcaaattgttttgaactttgttcatgaccatatccacaatgctcc

SEQ ID NO: 23737 - DNA, 254 bp, Glycine max
  Clone ID: 701101814H1
acgacaattttgtgggacgcagtgcctctacaatccccgaaactgatgataaaaaaactctggctgacaatgatatgggcagaagtgccactacagttcctgaaactgatatccaaaaaactttgcttgataatgttacaggaagcagagacagtgaaaacaatttgcttgacactgttacaggcggcagcgacagacaatctcaagtacgatcaaataaaccccagagaaagaacgaggtcaaagtacctatg

SEQ ID NO: 23738 - DNA, 252 bp, Glycine max
  Clone ID: 701101815H1
gataaatatagggacagacagacaaaccgaggctttgctcaatttcagtgaagaaagtgaaagatgggtaatcgtttcatctgcatgacgaagaaggagtcgaaagatgttggatcgagaagcaagagaatgggtagatcacagaggaagctggtgagtgcggaagagctgcatcttcaggcactttctatggcacttcaacagcatcaactgtctcagaggtttgaaggctccatgtctaggagaattggc

SEQ ID NO: 23739 - DNA, 252 bp, Glycine max
  Clone ID: 701101816H1
cggttcgattagcattattgctttgtgctgtgatctaccttgcaataggcttatttgggtacatgttatttggggcttcaacccagtcagacattctcatcaattttgaccagaatgctggttcagcagttggttccttgctcaatagtttggtccgtgtaagctatgccctccacatcatgctggtgtttcctctcttgaacttctctttgagaaccaacatagatgaagttctcttccctaagaagccta

SEQ ID NO: 23740 - DNA, 254 bp, Glycine max
  Clone ID: 701101817H1
gtcactgctttgtttagatcagaaccagatcgtgttctcttcttccattggcaaacatggcaactcaaatgcgcaagaagcgcaagtttgtggcggatggagtgttcttcgccgaactgaacgaggttctgacacgtgagttggcggaggacggttactccggcgtggaggttagggttacgacgatgcgcaccgagattatcatcagagccaccagaacccaagccgttctcggtgagacgggacggcgaatt

SEQ ID NO: 23741 - DNA, 259 bp, Glycine max
  Clone ID: 701101820H1
ccaaaacccaaaaacctttccttttactttttctcaaactgaaacataaaaaatggcgggtcttattccttttgtttacaaggctatcatgcaatccaagggcgacaacgagggtcatcctataggatcatggctttgtgagtctccttactcatacatgagacttcctggtgactcgggtaggtttcaaattcaagcaccagctgctgcttcaccctcttccaccaaccctaattcttcttctgctacacaaatcatt

SEQ ID NO: 23742 - DNA, 250 bp, Glycine max
  Clone ID: 701101823H1
gcaacatggttttgtcatggacaaaagggagagtgttccggcgtgccagacaggggcaagagttgaaaaatttcggtggcgacttggagatagacattgcgatccccacccacttccggtgcccggtaacattggacatgatgaaggaccccgtgaccgtttccacgggcataacctaccaccgcgacagcatcgagacgtggatcgagtccgggaaccgcacgtgcccggtcaccaaaacggagttgac

SEQ ID NO: 23743 - DNA, 252 bp, Glycine max
  Clone ID: 701101828H1
cgccggcccgcatcgggcggccgccggtgcctgcgcggtcctggcccttgagcgtgtccccgccgacatccgtgcccagggcggcgtggcccgcatgagcgacccgcagctcatcaaggccatcacgcgggccgtcaccatccccgtcatggccacggcccgcatcggccacttcgtcgaggcccagatcctcgaggccctcggcatcgactacgtcgacgcgcgcgaggtcctcaccctcgccgacgacgc

SEQ ID NO: 23744 - DNA, 254 bp, Glycine max
  Clone ID: 701101829H1
cgcggttttccaattcacagagcaacacaacgaaccaacaatggcgcacctcagccgcagtcgcagccgcagcacgggcaagcagcgctggcgccggtgcagtgcttcggtcgcaagacgaccgccgtggccgtgacctactgcaagcgcgggcgcggtctcatcaagatcaacggctgccccattgagctcgtggcgccggagatcctccgcttcaaggccttcgagcctatcctcctgttgggtaagagccg

SEQ ID NO: 23745 - DNA, 251 bp, Glycine max
  Clone ID: 701101830H1
cttcccttgcaccctggttttcctatcctagccggactgctattcgtcgcaggttcaatttagagggcagttgcgaacacttaatagatcatgcgggtgctgcggaagcattttggaagatgcggtgcagcgtgaacattgtgcgtcagcatgtgacttggcaactcatgtcttctgtcatgtatgtgctctttgtcaagaaggtcgtgagctccgtcgtaggttacctcatcctggctttaatgctcaac

SEQ ID NO: 23746 - DNA, 243 bp, Glycine max
  Clone ID: 701101832H1
gtttttgaattattcctcttttccgtactctcctctttggtctttaccttaacacgcgcacacacacacacacacgaaaaaaaaaaatacaaaacaaaattgttgtagtagttttgtaccttgtgaattactattagatcacgcacttcgcaccaaaaaccacacctatttccttcaatttagcctcgattcttccgccctttgttcaaaggagaatattctatttatttatttatttatttt

SEQ ID NO: 23747 - DNA, 254 bp, Glycine max
  Clone ID: 701101834H1
ctttcttgcacctaaggtaagcaatcaagaaggattagcagcagcagtggaagcaacggctgctttactgaacaacgctgtgaagccagtgattgtgggtgggccaaaactaagggtagcaaaggcacaaaaggcctttctggagtttgcagaagcaagtggatctccaatagcagttatgccgtccgggaagggactagtaccagagcatcatccacatttcattgggacatactggggtgctgtcagctcta

SEQ ID NO: 23748 - DNA, 257 bp, Glycine max
  Clone ID: 701101835H1
tgattaacgagaatggacaaggcagtggcgcttggttcccttgaaggtgaaatggccacccagcacatttcacaaccacagaagcgcaagggtggtcttgttaccatgcctttcatcattgcaaatgaggcacttgcgagggtggcaagtctgggccttttgcccaacatgatactgtatttgatggggacctaccggcttcaccttgcccaagccacccagatacttctctggtcccatgctaccagcacatttca

SEQ ID NO: 23749 - DNA, 261 bp, Glycine max
  Clone ID: 701101802H1
caacattcagcttcttcagatccgatgttcaatggccccggtaatttgccgcctactcccactcattcagtgtcgaggccggtgtgaaggactaactctggtttaggttaattaggaactccatggtagatttgaaatatctagtttacaattttagttgaaaaatcatgatctggtctcagttactttttgtctccactgtcttttgctgttgtaaaatctaattccatgttcattggatatgcctctattatatcgttt

SEQ ID NO: 23750 - DNA, 274 bp, Glycine max
  Clone ID: 701101758H1
tcgaactgccactgaggcacccacagttattcaagtctattggtgttaagccaccaaaaggaattctgctgtacggacccccagggtctggtaagactttaattgctcgagcagttgcaaatgaaactggtgccttctttttctgcatcaatggcactgagatcatgtcacagctggctggtgaaagtgaaagcaatctgaggaaggcatttgaggacgcagagacaaatgcgccatccattatcttcattgatgagatagattcaatagctcc

SEQ ID NO: 23751 - DNA, 278 bp, Glycine max
  Clone ID: 701101759H1
gtccaagttttttgagctgggtctgaacaaatccccagaagaaaagaatggggggaaagaatctatacctagtattaagctatcacctcctccagcaccactttcacctgttttcggcacgcagaagtctccaacaaactcacctacaaatctcagccttgagaaaactaatatagttgagactcctaaaacagttaaagacacagaacctgaggattctcctgaaaaacaaagcacagaggatgtactagatgatgattttggcgatttccaagcag

SEQ ID NO: 23752 - DNA, 149 bp, Glycine max
  Clone ID: 701101760H1
catttctatgaccaagtgcctgactcaatgagaagccttggaatagcactttaccttagtgtcattggggctgcaagttttcttagtagtttattaataacaattgtggatcatgtcactggtaagattgggaagagttggattggtaa

SEQ ID NO: 23753 - DNA, 204 bp, Glycine max
  Clone ID: 701101761H1
ctctgaggatctttttgctttgaggatcataacacccgaaatttgtagttttcttcttaaacatgataaatttattttacttttcctagcactgtccaatgcagcacaagctttgcaaggaatatcaacacacacacacatcaaacagtttttatgcatttattacaagtaacaacatctgcatatgtagattatcttttgttt

SEQ ID NO: 23754 - DNA, 149 bp, Glycine max
  Clone ID: 701101762H1
ctcgcagctccgccacctccacctcgtatctctcataggttattgcaacgagaacaacgagatgatcctcgtctacgacttcatggcgcgtggaacgctacgcgatcatctatacaacaccgacaacccccctttgacgtggaagcagc

SEQ ID NO: 23755 - DNA, 188 bp, Glycine max
  Clone ID: 701101763H1
gcaggaaaaatggagttgttcttctacgcggtgttcggcggtttgggagcggttgttgcagtgacggagctgagcaagagcaacaaggaacgaatcaacacctcttccgcattcaattccttcaagaacaactacctcatcgtctattccctcatgatggctggagattggctacaaggtccatatgt

SEQ ID NO: 23756 - DNA, 195 bp, Glycine max
  Clone ID: 701101764H1
tgacagatcttcaggacagaatcctctaaaatgtgtatgctctgtatttaagagaatctttggagtttgttacatatgccagccaattatgtttcaaatgtaatagaagagttcaatatacaattcttttagaaaataagctgctatattttcaggcttgtcatataggcgggtgtttctattttgtataacagg

SEQ ID NO: 23757 - DNA, 207 bp, Glycine max
  Clone ID: 701101767H1
cctgaatgtggatgtgactgaattccagaccaacttggtcccatatcccagaatccatttcatgctttcctcctacgctccagttatctctgctgagaaggcctaccatgaacagctttcagtggctgaacttaccaacagtgctttcgagccatcgtccatgatggccaagtgtgaccctcgccacggaaagtacatggcatgttg

SEQ ID NO: 23758 - DNA, 155 bp, Glycine max
  Clone ID: 701101769H1
caacaaaactcaataatggcattccagttgaattcgatggttacatgagagtgtccattgatacagaagtgttctttagaggtaaaaagcagcttgaaactttcaatgatttgaccagtgattgcaaggatggtattaatacctgtaatgttgca

SEQ ID NO: 23759 - DNA, 150 bp, Glycine max
  Clone ID: 701101772H1
ggaagaggagcgaaacgaacaaacagcgaactaatcaattgagccacttaccatcagatttagatctcccaacagagagtttctcaaaattgccaagtactcttttcaggatcaaggaagagactcaagaaccaccaagaggtgttgttc

SEQ ID NO: 23760 - DNA, 150 bp, Glycine max
  Clone ID: 701101773H1
cttttccttctctctggctttcctttgacgcttctgacactgctcactttctttctctccgtgtcctaatggctctccccgactcttcttcctgccgcaactccctgatcccctccttcatctactcctcttcctccaaaacgctccctc

SEQ ID NO: 23761 - DNA, 259 bp, Glycine max
  Clone ID: 701101775H1
caagtgatgaagtcccaagacttgccggaaggatgcgtagcacacatattagtcgtacatttgtactcctgaagacatagtcaggctctccctcgtttccaaggccttttattatgcagctgattacgacactgtgtgggatcgttttatcccctctgatttctcatctaccatttctccactttcatcctctaactctaacaaggatctctatttcactatctcagaacgtcacaccatcatcgatcagggttagaag

SEQ ID NO: 23762 - DNA, 185 bp, Glycine max
  Clone ID: 701101776H1
catagatccttcattctctgcaacgatcaaacccaaaaaacactgcacctctttttctgggtacgccactttctcttctttttaatttttttttgttcttctttttcttcaacccctctattcgcaaaggaagcaacggaatcgattctgttcagttttcctcgttttgagtttaaattcacagt

SEQ ID NO: 23763 - DNA, 225 bp, Glycine max
  Clone ID: 701101778H1
cttttgttggtcatgtttgtataggtggctgcatctgcattcggatgcgaaggaatgtccagtttgtaagcgagatgtgacacttacaagtgttaccccaatatatggccgtgcgaacaatgtccgtcgtcctgaggacgattctgcacttaagatccctcccaggcaccaagcgaagagagttgagagtctgagacaaaccactcagagaaatgcatttgcact

SEQ ID NO: 23764 - DNA, 84 bp, Glycine max
  Clone ID: 701101780H1
ggagaagacaagcctcatcctcaggaggaggtcatcgccaccgagtttcagaaagtcactgtctcagaccaaggagagaccaag

SEQ ID NO: 23765 - DNA, 247 bp, Glycine max
  Clone ID: 701101781H1
ctcgagccgcttaaatttctgaacattgaacaactcttcacacaagacaactttactctggcacttgtagcatcatgactggcagagaaatcctccatatgatgaaggtgaaagcagggtttggaacaccagacacagggaatggaaaaggcaaaatatcaacacacattacacatggctttcacttgatgaagggcaaatcagcgcatcctatggaagattatttagtttcagaatttaagcaaga

SEQ ID NO: 23766 - DNA, 277 bp, Glycine max
  Clone ID: 701101782H1
cgcgctgttcctctgtttctcgtttttgtgttcagaccgaaccctagctccgcatcgcaaccatgtcgaccaagcaaggtggaaaagctaagcctttgaagaaacccaagtctgataagaaggattacgacgagattgatgtggctaacattcagaagaaaaaggaagaggagaaggccgctaaaggagttgaaagccaaggcgcaacagacgggaagctttggaggttctgggctcaagaaaagtggcaagaaataagggctctttatcatgattg

SEQ ID NO: 23767 - DNA, 171 bp, Glycine max
  Clone ID: 701101784H1
ctgattttgcttcatctgtacttgtagagcctttttctactgcaaagggatggatgacaagtgctaaataagcactttcttcttcttcttcttcatcccttcatcgccaaacacaatgaaggaattgggagtggttgcaatcctctcttcaatagagttcttggacgttat

SEQ ID NO: 23768 - DNA, 217 bp, Glycine max
  Clone ID: 701101785H1
ctcctctctcaagcttatttcatcgtggatattttcacgtcttgaaggacgtaaaggatgcaattatggaccctaacaacaacgaccatttccaaaatgtccacggaatgcctccttatcaatatatgaagacagacgaagaacttaatcaactatttaacaaagcattggaccaaactgggcctcctgaaatgcgaatgctccattaactatacaa

SEQ ID NO: 23769 - DNA, 198 bp, Glycine max
  Clone ID: 701101786H1
gccggcgcgcgctgaagtttgctaggttcatgagcaggttcgggaagagttaccgaagcgaggaagagatgagggagaggtacgagatattctcgcaaaacctcaggttcatccgctcccacaacaagaaccgcttgccctacactctctctactaatcattttgctgattggacttgggaggagttcaaaagacaca

SEQ ID NO: 23770 - DNA, 274 bp, Glycine max
  Clone ID: 701101788H1
taatagtggagacctcagggttgttcatctctttttctcacttgtttgtttcctcatatttcttggtgttttttaggctttcttgttctgttttgtcctatctaagtgttgatcttaaagggggaaaatgagttacttgggtttgggtgttagtcatggtacagttccagtgtaccatggaacaaaactcaaagtgttggataggagggtgaggataacagagctcgtgttaaggtgtgtgagccttggtctaggagctgttgcaattgttctc

SEQ ID NO: 23771 - DNA, 275 bp, Glycine max
  Clone ID: 701101789H1
cttaattaatcaattaagctagctaccttgattaatttgccaacaagggctatgcatggtgtttcccccgaagaataataacttctatgttgaggagtgctaacgatctgtctatgcagttccctaatttaggctttttcgtcttttcctctcatcagctacagttgttgggggtgtttggaagagaaggccaaaaccatgggggcatgcatcaaattgtagataagcatgcttgtgtccaagggtgtattttgtatcccttttgtgtcttttct

SEQ ID NO: 23772 - DNA, 274 bp, Glycine max
  Clone ID: 701101790H1
gcattttaactccaattggcctgttcccagagcagataagtatggtgtccagccactttccatatggctaccaagcagaaattatggctctggacatcctcatgaaaattctaccaaccataacctgtctgttccaaagggatggcgcaatggggactggatctgtaactgtggcttccacaattactcatcccgctctcagtgtaaaaaatgcaatgcttttccacctgcaattgatgttaaacttcatgctgtttccactttttggtggtga

SEQ ID NO: 23773 - DNA, 254 bp, Glycine max
  Clone ID: 701101792H1
gtcggagttcatcagcttcataacaggagaggcttccgataagtgccagaaggagaagaggaagacgatcaacggcgacgatcttctctgggccatgactaccctgggcttcgaggactacgtggatcctctcaagatttacctgcacaagtatagggagatggagggggagaaaaccgctatgatgggaaggccacatgagagggatgagggttatggccatggccatggtcatgcaactcctatgatgacga

SEQ ID NO: 23774 - DNA, 276 bp, Glycine max
  Clone ID: 701101793H1
cccccgagattccgtgagttgcaaaaatgaagacgattctttccaccgagaccatgaatatcccggacggcgtgagcatcaaagttcatgccaaggtcatcgaagttgagggcccccgcggaaaattggtgcgagacttcaagcatttgaatctcgattttcagctcattactgacgcaaacggtaaaagaaagctgacaatcgacgcgtggtttcgttctcaggaaacatccgccgccattcgcaccgccttgagccacgtggagaatcttatca

SEQ ID NO: 23775 - DNA, 280 bp, Glycine max
  unsure at all n locations
  Clone ID: 701101794H1
tcggaatcggctcggaagccttcttctgcgtgtccgggagaagaagaaaacacctccgagtcaactcggacgagttgcctcatcgtacggtatcgtcctcngactctgtactcttctttcacttccgaaatcaccgttcgcggggttttgctctctctccgttttttgttcagatctcgcattggtttcagctgaaacgacgccgttcaatttccttcgcttaattagggatttatatcttaggtcgaaacttgaagtgatgatggtgtggttgttgtga

SEQ ID NO: 23776 - DNA, 95 bp, Glycine max
  Clone ID: 701101795H1
ctaaaattctggtgaggaagttaccagaaagcaagtatcctgtggttcgattatctgaactacctgctaagcagttggaaaatgataaatctgag

SEQ ID NO: 23777 - DNA, 261 bp, Glycine max
  Clone ID: 701101801H1
cgcgtcgctccgcaccagtttcaccgcacgaatatcttgctgtttggcgcgatccgagaaaaactctgtaaacatgttggtttaccaggacctccttacaggtgatgagcttctctctgactccttccgttacaaggacattgagaatggaatgctgtgggaagttgaggggcagtgggttgttaaaggcgcagttgatgtagacattggtgcaaacccttctgctgagggtggaggcgaagatgcgggcattgatgatgc

SEQ ID NO: 23778 - DNA, 220 bp, Glycine max
  Clone ID: 701101757H1
ctcttcttgacaatgctttgccacatgaagttcggcttgttcctcttctttgccttcttcgtgttgatcatgacattcttcgtctacttcttcttgcccgaaacaaagggcattccaattgaagaaatggggcaggtttggcaggcacaccccttctggtccagattcgtggagcatgatgattatggcaatggtgttgagatgggaaagggagctatta

SEQ ID NO: 23779 - DNA, 259 bp, Glycine max
  Clone ID: 701101715H1
ccggtctaattattcaggtaccgagggaatcaatgttttttgttattcctgcttttggtggcattgtttcctgggagggagaaggggcaccttttggggaatctgaccagagcatttctcatcagattgttgacagggaagcacaaggacatcggttcctctcaagagcatatgttccacccacagtgggtatatgactgtgtgaatgcacggattatcccgccaactgagaattatttggtgggaacgcctcctccac

SEQ ID NO: 23780 - DNA, 281 bp, Glycine max
  Clone ID: 701101718H1
gagtctgaagaagctgaagcttctggagcgaggtggaggctgatgaattaccacagaataataaggaagctgagaataatgatgatattcatcaaaaaagtaatggcgatgttgagatggctgtggaggctaagcctgaagactgtggaatggctgatagtaaagcatgtgataatggtgaccctgtgcttgcaagtcataatgagcctgctacgccacagcctgctcctgcagatacaaacactgaaattatgaatgtattagaagttgagaataaagtt

SEQ ID NO: 23781 - DNA, 142 bp, Glycine max
  Clone ID: 701101721H1
cttcgctcaagctgtgacatacggtttaattgtttatgacatgaaccgagttgactgggactgagagccattcttttggtatctatttatcagtttcgtcacattgttgtactttactttctacggtatgatggctgtggga

SEQ ID NO: 23782 - DNA, 184 bp, Glycine max
  Clone ID: 701101723H1
cagggaatcaaagaagacatccatgatgacattgtctcagccctttctaaacgatgttgagagcctagattcatcatcaataactacaacagagtcatatttttatgggaagctgattgcaagggctgcaaggttggtattgattgctgaggagttgaactaccctgatgtgatttcaaaggtt

SEQ ID NO: 23783 - DNA, 179 bp, Glycine max
  Clone ID: 701101724H1
ggacgcgattctggcatgagttctgagactatcaattcatccactcaaagtactccactgagcaacgagcgcgtttgtagcaccagcttcagccgtctctccttggatcttgctcctccttcttcttcgcctgagaccctcttcgtcaaaccccagcgctcatccgacttggctcactc

SEQ ID NO: 23784 - DNA, 275 bp, Glycine max
  Clone ID: 701101726H1
cgcaccggtgcttgattgccacacttctcacattgctgtcaagttttctgaaatcttgaccaagattgacaggcgatctggtaaggagcttgagaaggagcccaaatttttgaagaatggtgatgcaggtatggttaagatgattccaaccaagcccatggtggttgaaactttctctgagtatcctccccttggtcgttttgctgtgagggacatgcgtcaaactgtggctgtcggagtcatcaagagtgttgagaagaaagaccccaccggag

SEQ ID NO: 23785 - DNA, 277 bp, Glycine max
  unsure at all n locations
  Clone ID: 701101727H1
gcaaacttcaacttgtaatcaagggagagagaaaatttcaagcacaaaaaatggcggagaagaaagtggtgatcctaggaggtggtgttgccggtgccaaccttgcaaaaactatacaacgtcaagccaacgtcacccttattgatccgaaggaatactttgagattccatgggcaagtttgaggggattggttgagccncttttgctgaaaggatagtgatcaaccatagagagtacttcaaaaagggtaaccttgttgtatccagtgctgtcaac

SEQ ID NO: 23786 - DNA, 222 bp, Glycine max
  Clone ID: 701101728H1
ctcaatactcaattcatcatcagcttgtggccatagtctcattatttatccttctgcttccaaatatccatgggtggggagacgatgggcatgtcattgtttgcaagattgcacaggctcgcctcagtgaagcagctgcagaggctgtgaagaaactgctgccaatatccgcaggatatgacttgtccacaaagtgttcttgggcatatcatggtcatcata

SEQ ID NO: 23787 - DNA, 161 bp, Glycine max
  Clone ID: 701101729H1
cctggatatcatgacaacggcaggtggggtgtttaacgtgtatatttcatttcacggttgggtacaggcagaatgaaagtgcaggcgaaaagggggaaaacaaattggctagtgctgtgcgtcacgtctaatatcttagtttgtctgatctaatctaaatt

SEQ ID NO: 23788 - DNA, 264 bp, Glycine max
  Clone ID: 701101730H1
cgacatgtagtactagtgctccagctatgtggcttccaccagacgcacttcttgttccctttgtgaaccgaactgccaaggctgttgcttgggcaagtctgaaacatctccgggtgccaaacccattgccgtgtagcgataactgtggtgtgagcatcaattggcatttgtacacagcctacactaaaggatggcgtgcaagggtgacactttttaactggcgtgacactaattttgcagactggtttgccgcagtacaaatgg

SEQ ID NO: 23789 - DNA, 280 bp, Glycine max
  Clone ID: 701101732H1
gccatggtggactctcctgtgggtcaaaacctatgtgtttccaacatatttcacaagtcatttattgaagtaaatgaagaaggcactgaagctgcagcggccacctctgcaactatacgattgaggagtgcgatgcttccaactaaaatagacttcgtagctgaccatcctttcttgttactgatcagagaagatttaactggaacagtactctttattgggcaggtgctcgatcctcgtgcgggatgattttagtggccatacactggacaacattggt

SEQ ID NO: 23790 - DNA, 192 bp, Glycine max
  Clone ID: 701101733H1
cgaatacgtgatgaacaacatggtgttctctcaatcagcaatattacgcgaggaacttcaagaagcgatgagtattcaggagctcattaagaaaccactcacttcagttcctcaacgttacattcaactacaccataatgaaccttcacttctcgcaggtgaaacctttagtcacgcactcccaaccatcac

SEQ ID NO: 23791 - DNA, 283 bp, Glycine max
  Clone ID: 701101734H1
atcaaagtcggaacctgcatgcctttggtggctgcgtttcttccttggcgctgtgttggtggaatctctctctctctctctgactctgtgtctctttcccaggccaggaccgcgcgaaacacgtaaattccccttcaaacacacaaacaaaacgcagtgtttgaagcatctctatatatacccccccttctcagacaaacaatccccattccctcttctctaaccctatcttctctcttgtcttgattccattcaatttaaacctcagggcgtggcaagtttc

SEQ ID NO: 23792 - DNA, 166 bp, Glycine max
  Clone ID: 701101736H1
ccttggtgtgggtagccacatgcaggagcttaggagggttacgtacgggatcatgggggagaaggataacatggtcagcatgcatgatgtcatggatgctcagtgggtttatgctaattatagggatgagacttatttgacgagggttgtcatgcccttggagatt

SEQ ID NO: 23793 - DNA, 274 bp, Glycine max
  Clone ID: 701101739H1
cgcctctccctctctctcaaaaatcgttctcttcgattttagggttttgttttgctgctgcctccgttccccccttctcataaacaacgcgttttctcttctgcttcgtatctattctacgcttttggttttggttgattcaaggccttcacagcattcgttgcggcattttaatcgatttatccaagcaggactgaatgaactcatggagtctaaacgtgggaaaaagcagtctagtacccgtagctagtcactcattgttctccgtagctcc

SEQ ID NO: 23794 - DNA, 168 bp, Glycine max
  Clone ID: 701101740H1
cacaattcctacacatttctactctttagtttctccaattttctttctcaattctcaacaatggccactacaacacaacttcacttaccccctggattcagattccatccaacagatgaagaactcgtcatccactacctttgtcgcaaatgcgcttcgcaacatatc

SEQ ID NO: 23795 - DNA, 216 bp, Glycine max
  Clone ID: 701101742H1
agagcatgattgtggtgtgctttgttttcatttcatcatatgacagccttgtgggtttctttggtgtttcttgatgcatacttaatttactttattattgtgtatttatctcttccatttacaaaaaaaaaagtttgtgtaggtttccttctttgaagtaaaaagaaattaaatatgtactgaaaatggaataatagtgtgttttatttgtgtttt

SEQ ID NO: 23796 - DNA, 209 bp, Glycine max
  Clone ID: 701101743H1
tctgggaatagatctaaatgagacacaatggaaatgcttctatactgtgtgaaactgccaggttgctacaagacttgctcagtcagatcgagtccctcaagacagagcatgtcactctgttgtctgaatctaattatatgaccatggagaaaaatgagctgaaggaggagaattgtagcctagacacccaaattgagaaatttcaaggt

SEQ ID NO: 23797 - DNA, 178 bp, Glycine max
  Clone ID: 701101744H1
tagaaaattaaaagaaactagaggaaattgaaagagacaggaagacaggttgatgatggtggagctgaaacatctctatgttctactgtggacaaccggctgtggatctattacactgttgttgatcttttcattcattatgtatgaaattatgattataaaaatgtttggtttgcag

SEQ ID NO: 23798 - DNA, 284 bp, Glycine max
  Clone ID: 701101747H1
ataagctttacttacttcagcaatccacatatggcactttcttcttcatcatcttcaccatccatatttgccatagctttgttcactcttttgcttataggaagttcatcagctcaactctctgagaacttatatgatagtacatgtcacaaggtatatctatgccgtaaaatccgttcttcaatctgctttggctatagatatcgcacaggagaatctatcgttcgcctcttctctcatgactgcattgtcaatggtagtgaaggattagtaatacttgatgg

SEQ ID NO: 23799 - DNA, 288 bp, Glycine max
  Clone ID: 701101748H1
cgacgaccctttggtgtttggatcttcaagaaagagagacccttgggatttcgtcaccatgagtctcttcggtcttggaaacagaaaccataaaacatttcgtccaaaaaagagtgctccatctggaagtaagggtgctcaacttcaaaaacacatcgataccacgctcggtagtgggaacttgagggaggctgttagactgcctcccggtgaagatattaatgaatggctagctgtaaacaccgtggacttctttaatcaagtgactatcctgtttggtactcttac

SEQ ID NO: 23800 - DNA, 196 bp, Glycine max
  Clone ID: 701101750H1
ctgagtctgaagaagctgaagcttctggtgcgaaggtggacgctgatgaattaccacagaatactaaggaggctgagaataatgatgatattcatcacaaaaagtaatggcgatgttgagatggctgtggaggctaagcctgaagactgtggaatggctgatagtaaagcatgtgataatggtgacactgtgcttg

SEQ ID NO: 23801 - DNA, 199 bp, Glycine max
  Clone ID: 701101751H1
gtttgaaggtgaggattatgggacctaattatgtccctggggagaaaaaggatttgtatgttaaaagtgtgcaacgaactgtcatttggatgggaaagaggcaagaaactgtagaggatgtcccctgtggtaatacagtggctatggttggtcttgaccagttcatcacaaagaatgcaacattgacaaatgagaagga

SEQ ID NO: 23802 - DNA, 117 bp, Glycine max
  Clone ID: 701101752H1
cttttatgtctgaattagacgatcaaacacctactgccttcgatccttttgctgatgcaaatgctgatgactcgggtgctgggtcaaaggagtatgtgcatattcgcgtacagcagc

SEQ ID NO: 23803 - DNA, 185 bp, Glycine max
  Clone ID: 701101753H1
gtgatttggagtttggagcgactgaactaatcattaatttgcactcgctgtttcagcttcatcacccttcttttgcatcatttatatctcttgagaaatggcacaagaaacctttctattcacatctgaatctgtaaacgagggtcaccccgacaagctgtgcgaccagatctctgatgcagtac

SEQ ID NO: 23804 - DNA, 233 bp, Glycine max
  Clone ID: 701101754H1
ggtggttagaacttgagactaataatggatggtatagttcagctggagaggcaacttgttgattatactgcttcactatttcatgagggctttctagatgaccaatttaaccagcttcagcaacttcaagatgaaagtaacccagattttgtggttgaagtggtgactctcctttttgaacgacgcgataggcttcttaatgagctccacaaaagcactaggccagccaagca

SEQ ID NO: 23805 - DNA, 195 bp, Glycine max
  Clone ID: 701101712H1
ctccgatggcttcgaccaagcaggcttcgcccaaacaaacaacaacatgcagctcttcctgggctccttcagaacaaacggttacaggaccttgtctctgctcatcaaaaaacaccaacagactccctctaccgtcacctgcattgtctacgactcctttttcccgtgggatctcgacgtggccaagcagcatgg

SEQ ID NO: 23806 - DNA, 227 bp, Glycine max
  Clone ID: 701101755H1
cgaaaccggcgactttattgagtctttaacaagagttatgcaaaaggggttctttgaatcacgcgcttatgcagtgttcttgttgaaatccatgtccgaagtggctgagccagtgcaattattgcatctaagacaagacctttttgtcgaactagtacaagtcttgaaggatcaaacttctcacaagacatcagaagcaacacttcaaaccctgatccaattctctc

SEQ ID NO: 23807 - DNA, 102 bp, Glycine max
  Clone ID: 701101756H1
ctccaagctattgggttggccactgacgtcaagttacccacagagcgtcagccgcagacaatggcattcaatagtgactcaattgccacatggcacaccata

SEQ ID NO: 23808 - DNA, 272 bp, Glycine max
  unsure at all n locations
  Clone ID: 701101678H1
cctccttacactccccacccagtttatcactctcctccaccacctcctaccaacaagccttacatctatgcgtcacctccccctccttaccactattagctagcatagctctatggatatgaagaatatgtgcaacgaataaaagaaagcgatagacaaggaagaagaagcgcttcgcgatgcacgaaagagaagaattggaagcaaagtttcggcgttttgtcttttataaaaaaaatgttanatcattataattttctatgatagggatg

SEQ ID NO: 23809 - DNA, 188 bp, Glycine max
  Clone ID: 701101680H1
tcagattcttgactggttatctcacagtcctactgatatggagagctacatacggcctggttgtattgttttcaccatttatctgcgtcaggctgaggctttgtgggatgaactttgctatgatctgacttccagtttgaataggctgttggatgtctcagatgatactttttggagaaacggatggg

SEQ ID NO: 23810 - DNA, 265 bp, Glycine max
  Clone ID: 701101681H1
caaatttctcattctcccatttcctctcagaaccctcgatcactcccacgcgctcctatatcctctccttcaccgtcgctctctccaacgatcacaacaacatcgtcatcccatggcaaacgccgcatctggtatggcagtccatgatgactgcaagttaaggtttttggagctgaagacaaagaggacacaccgtttcatagtttttaagattgaggagcagcagaagcaggtcattgtggagaagcttggtgagccagcccaa

SEQ ID NO: 23811 - DNA, 240 bp, Glycine max
  Clone ID: 701101682H1
agatgagtgaggctgcagctacgacgacttcgtcttccatgatgcgcaattaccctctcatttccgccatcgttgctttcgccatcgcacaattcatcaagtttttcaccgcctggtttaaggaaaaaagatgggatcccaagcaacttgttggatctggtggaatgccttcatcccattcggctactgtcactgctcttgccgcgggaatcgggttccatgaaggctttggaggactct

SEQ ID NO: 23812 - DNA, 238 bp, Glycine max
  Clone ID: 701101683H1
cgaaagcgattttgacggaagaagaacctgaggccgatttttgctgggaacttggagtacgatagtcgtcaatcagaggttgagcgcttgtactcagagtattgaaggattgaccgcgtggacatgaaatctggttttgcttgtgtctattatgacgatgagcgtgatgcagaataagcaattcgtgcacttgacaatgttccatgtgtggcatgaagagcgcagctgttagttgagt

SEQ ID NO: 23813 - DNA, 259 bp, Glycine max
  Clone ID: 701101685H1
attaaagaaagagtgaccgagagcgatcgagagagagagagagagagagagcccgatcttcctctatcgatctctgctctttcctcccccctttcaagattcgttgcattttctcatttctcgcgaattccgaaatcgcgttccgttggctctcgactcccacgctccacgttcacgattttgattgagatgaaacttgaaagggcttgatagtcaacaagggaagagcgagtgccgaggcccaggttcatgggagagt

SEQ ID NO: 23814 - DNA, 264 bp, Glycine max
  Clone ID: 701101687H1
caaatctcctccttagactgccaacccagtatagccattggatcgaattcagtctgaattcggtctaatggtttgggagttctaattaagtctaaggaacagaattctgtacatatatatatttagaagatcacagggtgcttgatcagtggtgtatcaggagctcccaggtcccgaggttggcttctgaaaaaggtgtggtgattttcacaaagagctcttgttgcctctgctatgcagtcaacattctgcgtcaagaacttg

SEQ ID NO: 23815 - DNA, 265 bp, Glycine max
  Clone ID: 701101688H1
gttgaagcctctgatgaggcttgcttatattaacaccattgtctacccgtttacctcaatcccattgattgcttactgtacgcttcactgcattttgtcttctcacaaataaatttattattcctgagataagcaactttgccagtatgtggttcattcttctctttgtctccatttttaccacttcaattcttgagcttaggtggagtggggtcagtatagaagactggtggagaaatgaacagttctgggttatcggtgggac

SEQ ID NO: 23816 - DNA, 267 bp, Glycine max
  unsure at all n locations
  Clone ID: 701101689H1
ctcattccttcatttttaaacctagctccatctccctccactcaccataacatgggatcagaagcaaatgctgccaacaccaacttctgtgtaaatgttagcaacaatggctacattagtgctaatgacnccttgaactggggtgcggcggcggaggctatggctgggagccacctcgacgaggtcaagcgcatgctagaggagtaccggaggcccgtcgtcaagctcggtggagagaccctgaccatctcgcaggtcgcggcgatc

SEQ ID NO: 23817 - DNA, 265 bp, Glycine max
  Clone ID: 701101690H1
tagacttagaggcaatttctgctagtagctctgaggtcccatcaatattagagttcctgcagcggcggaagttggaagctaacaaggctaaacaattgtgcttgggtataacacgtacacttattctagagcataggcctgtgcctgtggttgccaaggctgtaaatgtactagtcacctcatactcccattcaattaaaaccggtagctatcttaagggaccgaaaccagagaacacatcaacttctgttgtacaaaatactgg

SEQ ID NO: 23818 - DNA, 264 bp, Glycine max
  Clone ID: 701101691H1
agaaaaaataagcaaactgaagagcctgaaaaaaacatctccgtcagcttgcattgtttttcctcctaagatcttccggttgttggagaaaccattgcatgagtttcgggggcacagaggtgaagttttggatctctcttggtcaagcaataattatcttctgtcatcttcagttgacaaaactgttcgtctatggcaagtgaatcatgaccgttgcttgaaagttttctcacacagtaattatgtgacgtgcatacaattcaa

SEQ ID NO: 23819 - DNA, 266 bp, Glycine max
  Clone ID: 701101692H1
cggctcgagcttggatactggaatagtgtgccaatatgagctctcgggcaggcaagggacctgccgtcagaagttatcggaggagaaagacagcgttggaccttgaccttaaccgtgtaccagctggtgagaatcgtgagcaggagggaccttcgactcagtcggtgcctcgagaagttcaagttgaacagcagcagcaggctactcaacctccgatgattgacgtggaagccattgatgatgatgttgttgaatgtaccccaagg

SEQ ID NO: 23820 - DNA, 266 bp, Glycine max
  Clone ID: 701101693H1
gtttcgttattcgcccgacacattttttctccgatcccctattcctctccattctccgttgtgtcgatttttgttactcaaaagggaaattgatttgatagatagacagatagatcgtttctatgggttaaagtgaaatccgaatccgaatctgaatctgaatctgatccaatcattttcatgttagggcgtgcgatctccaatcaagcgcggttgtgtttaggtttcattttgttgggcgtgtgagtcgtagggggtttcgaaga

SEQ ID NO: 23821 - DNA, 268 bp, Glycine max
  Clone ID: 701101694H1
agttaaacttggaacccaaggctttgaggtttcaaaattgggattcggatgtatgggccttactggagcgtacaatgaccctctccaagaacaggatggcatatctgttatcaagtatgcgttcagtaagggaatcacattttttgatattgcggatgtttatggagccaatgctaatgaacttttggttggaaaggctttgaagcagctgcccagagaaaagattcagatagccacaaaatttggtattgcttcacgaggttttcct

SEQ ID NO: 23822 - DNA, 270 bp, Glycine max
  Clone ID: 701101696H1
ttcgtagatcgaaagggaatcttcttccatggcctccaagcggattctgaaggagcttaaggacctccagaaagaccctccaacctcttgcagcgccggtcctgtagcggaagatatgtttcattggcaagcgactataatgggtccccctgatagcccttatgctgggggtgtttttctagttactattcattttcctccggattatccattcaagccacccaaggttgcatttaggactaaagttttccacccaaatatcaacagcaa

SEQ ID NO: 23823 - DNA, 202 bp, Glycine max
  Clone ID: 701101701H1
cttaaataaatgtcttcctagcaagattagttttagatgcagtgatctaaatgcaattcttctcattgaaattaactgtgtttgccggtgtactgttgcatagttgtttaataccagtttttggagggagaggagaggggagtacaattgaattttgctctcggaaagatgctaaaatttcataatggaactgaatatcatt

SEQ ID NO: 23824 - DNA, 241 bp, Glycine max
  Clone ID: 701101702H1
cactcgagccgattcggctcgagaaaaacaccaattctccagcctcacattgaaaaaaacacaacgcagacaagaaaaatcaatgattttattttatttttctacgaaaatggttgatttacattggaaatcaaagatgcctagttccaaaacaccaaaactctctctctccgacaacaagtccttaccctctttgcaactacccttccgcaccacagatatctcactcgccgctccttcc

SEQ ID NO: 23825 - DNA, 184 bp, Glycine max
  Clone ID: 701101703H1
gacataacttgcctagattggttggatcagcagccacctcaatctgttgtgtatgtctcttttggtagtttagcaatagttgaacctaaccaattcaaagaactagctctaggacttgatctccttaacatgccttttctttgggttgtacgttccgacaataataacaaggtaatagtgcata

SEQ ID NO: 23826 - DNA, 279 bp, Glycine max
  Clone ID: 701101704H1
caagaagatgactggggggggtatcactatgcaatcgacgccgggaagctcaggatacttggatttgtatccagagcggaagatgtcctttttcaaaaatccttacattctcggactggctgctgtcgccggcatcggtggtctcctcttcggctacgacactggtgtgatatcaggggcacatttatacattaaggatgattttgaggaggttagaaacagcaatcttctccaggaaacaatagtcagcatggctcatcgcggggcaatcgtgggagc

SEQ ID NO: 23827 - DNA, 201 bp, Glycine max
  Clone ID: 701101705H1
caaggttatctaggaaactctctgatatcagaagtccacaatccaacttgagcgatcatgctggggaccatcccgttaatgattattcaatagacagacaaatggatacaattcacaggaacttgtctgacgcattgaatagtgattcaaagaatgatgagaggacaatgaagcaggatgacatttctagtgtacttaatc

SEQ ID NO: 23828 - DNA, 205 bp, Glycine max
  Clone ID: 701101706H1
ccaatccggtggctttgacgattaactatcagcaggcggataccgggaccaagatgatacacaaagggaagaacacgaggagtaggattatatccaaaggaatatcggttgggcattccaggaactgttatagagggcttgttcaggttctgtccaaggctgacaatgcccgaaactcgtcacagtgtgattctatgcttattgg

SEQ ID NO: 23829 - DNA, 140 bp, Glycine max
  Clone ID: 701101707H1
tgccattcgcgtttcgagcagtggcatcaaggacttccattgtcaccccatcaatgctcgactgtcgttctgatgaagcacttgtggtgagttttgcattccagcttcatcaggactacagtcgaggttctagaccgcga

SEQ ID NO: 23830 - DNA, 245 bp, Glycine max
  Clone ID: 701101708H1
cgaattgttgcaactttttgattcctaaattctctaaaattcgaaattctaatttcgttaggggaaagagattgtttgtgtgtgagtgagtatggctggaaaaggcgagggtcctgctatcggaatcgatttgggaacgacgtactcttgcgtcgacgtgtggcaacacgatcgtgttgaaatcatatccagcgatcagggtaacagaactaccccatcctacgtgggtttcactgacacagaac

SEQ ID NO: 23831 - DNA, 126 bp, Glycine max
  Clone ID: 701101709H1
cgcaaaacgctgctttggttcttaaggagatgcatgttgaggctttggtgaaatgtgtaggagtttttgaggctttgattaacatgattaaggagcctgttgggagtggttccaccaaggcctgtt

SEQ ID NO: 23832 - DNA, 261 bp, Glycine max
  Clone ID: 701101710H1
ccaagagtgaaaaccttctcttacccttctctcaagtttcaagagatttcatcatggctccaaagaaggacaaggctccaccaaattcctccaagctcgccaaatctggcggtggcaagcagaagaagaagaactggagcaagggaaagcaagacgagaaggtgaacaatatggtgctgtttgatcagggcagctatgacaagctccttgtctgaagctcccaaatacaagcgaatcactccttccattctctctgatcgt

SEQ ID NO: 23833 - DNA, 189 bp, Glycine max
  Clone ID: 701101711H1
caacgatcccaccaccgataaactcatcacgtggggcacagccaacaacagcttcatcgtcctcgatcccctcgacttctcccactcactcctccctactttcttcaagcacaataacttctccagcttcgttcgccaactcaacacctatggtttcagaaaggtggatccggatcggtgggagttcgc

SEQ ID NO: 23834 - DNA, 266 bp, Glycine max
  Clone ID: 701101677H1
ccaagatgaagaggcagagaggtgtgcatgtgaatgctgttaggcccatcatgaataataatcctcccaatgttgaagatgtagctgcagctgcaatggggaagaagaaagtgaagaaagagggtgagcagaaggtggggaatattatggtggaggaagaggagataaaggaaagtagtactagtagagacagcatggtgggtgggtatttgcagcaacatcaacaaggtggcatgctgatgggttggaattgggaggagaatatg

SEQ ID NO: 23835 - DNA, 65 bp, Glycine max
  Clone ID: 701101643H1
ctcgattaggagcgttgaatttgaatgcggagtttatggcggtgatgcatgagatgataaggaag

SEQ ID NO: 23836 - DNA, 275 bp, Glycine max
  Clone ID: 701101644H1
caaaacaatgacaatcttcgcagtccccttatatctcaggcttaatgccaaggcacaatgtcattcaataataaaccagttgtgttggttcttcccagtatatgatgcaaatattcatatgtcaagggcaatgaagtgcaaaaggggcttgtatatgcttgtttgtatagatggaaaagtcttgaattccgaaagagtggccaattttttccagcttcttaaatgaagagcctaaaacttgcatatagcactgaagttatcttttgccttggctc

SEQ ID NO: 23837 - DNA, 275 bp, Glycine max
  Clone ID: 701101645H1
atcgcaattcacaaaatgggcaattgcttgaggcgccaatcgcggatcggatactccaccgacgacgatgaggactgggaggattttcgggcggcggcggcggcaagcggtggtgttaagacatcgacgagagaggtgaaaattaagataacgaagaagcagttggtggagttggttggtaaagttgaggtaaaggagttgagaatggaacaggttttggcacacttgatgaatcactctcttcaacgtccatggaggcctgctcttcaaagcat

SEQ ID NO: 23838 - DNA, 88 bp, Glycine max
  Clone ID: 701101646H1
ctttattggattatttattagttaagtaaatattgtacccatctttttggaatatgttttgtcatttacacaagttatttttctggcc

SEQ ID NO: 23839 - DNA, 136 bp, Glycine max
  Clone ID: 701101647H1
gtcggttttgaaaagagttaacaatctcttctcttcgctcctgcacttgttgtttctttgcccttcatggcatctcaggctagccttctccttcaaaagcagctcaaagatctttgcaaaaaccccgtcgacggct

SEQ ID NO: 23840 - DNA, 265 bp, Glycine max
  Clone ID: 701101648H1
tgagaaaaaaggtggtggaaactggcaatcgtgtgataccagagagctgttttatagtttccaccgtgacgatgatcctgcagaggctgttatgcacaagtgtgtggtgcattttgttcccagacacaaacagcttccaaagcgtaaggatcaccccgggtttattgtacagaaggtgtatgacactgtggaaagaaaactctggaggctgactgataaggattatgaggaatttaagcagcaagagattgatgtgcttgttgag

SEQ ID NO: 23841 - DNA, 261 bp, Glycine max
  Clone ID: 701101649H1
ctgacaatgtgcagccttcaacagcagtgcctagcagtctagaaccagtagttatggaaaagcataaaggagtaaatgattcagctcatgttactgtaacaaaaatgttggccaatcttgaacgtccaagtgcacgtgcacgtgtgcagcctaagccatctaatgttcggaatctggatgccaagaatcatactgagaaacatggtgtgaacaatagtccatctacttcctcccattcccaaatcctctacagaaaatgtc

SEQ ID NO: 23842 - DNA, 267 bp, Glycine max
  Clone ID: 701101650H1
gagagacataagcataatattgagaaataatggagggttgtacttattgtgtgaagttgctatgccttgttgggtttgtggtgcttgtgagtactattgcaggggtggagagtgctggtgaatgtgggaaatctaccaccccagataatgaggcttataagcttgcaccatgtgcctcagcagcacaagatgagaatgctagtgtttctcagagttgctgtgctcaggtgaagaaaattgggcagaacccaagctgcctctgtgcat

SEQ ID NO: 23843 - DNA, 266 bp, Glycine max
  Clone ID: 701101651H1
atcagaatcattaaagataagattatattgctaagaagaaaaaatatgaaggttgtctacttgcttgttgccctcttggctttgacatcaactgttgtctctgcctatgaccctagtcctctgcaagatttttgtgtggcagccaaagaaaaagatggtgtatttgtgaacgggaaattctgcaaggaccccaagcttgtcaaagcagaagatttcttcagacatgtggaacctggggaaactgacaacccactaggttcaaacgt

SEQ ID NO: 23844 - DNA, 264 bp, Glycine max
  Clone ID: 701101652H1
gaaacatttcactaatagagagacataagcataatattgagaaataatggagggttgtacttattgtgtgaagttgctatgccttgttgggtttgtggtgcttgtgagtactattgcaggggtggagagtgctggtgaatgtgggaaatctaccaccccagataatgaggcttataagcttgcaccatgtgcctcagcagcacaagatgagaatgctagtgtttctcagagttgctgtgctcaggtgaagaaaattgggcagaa

SEQ ID NO: 23845 - DNA, 271 bp, Glycine max
  Clone ID: 701101654H1
atatattccattctctctgtgtatttccctacctctcccttcaagatgcagatcttcgtcaagaccctcaccggcaagaccatcacccttgaggtggaaagctctgacaccatcgacaacgtcaaggccaagatccaggacaaggaaggaatccccccggaccagcaacgtctcattttcgccggaaagcaacttgaggacggccgtacccttgctgactacaacattcagaaggagagtactcttcacctcgtcctccgtctccgtggtg

SEQ ID NO: 23846 - DNA, 271 bp, Glycine max
  Clone ID: 701101655H1
tggtggaggaggaatacacgaagcaatatataggcaatgaaatgaggcgttttgactggccttttcggatcggatcgaatccaaaccctaatctaatcccacaagcctattagtctcattcaatcgaagaagcgagcgagactgtgtctctctcccaggccatgcgaccaccctgttcctccgccatcgccctctccagagaggattcttttttcggtttcgtcgctttctccgtcgattccaccagccatgactgcagtacaccacgccg

SEQ ID NO: 23847 - DNA, 270 bp, Glycine max
  Clone ID: 701101656H1
ttctgcaccgagattcattcttcaccaaaacttcgcaaagaaacactacacatccatggcaactgctggcgtgcaagaagttcgtgttccccctctaacttccacctctgagccaccttctctctttgacggaaccaccaggttgtacatcagttatatttgtccctatgcgcaggggtttggatcactcggaactataatggactacaagacaagatcaaactcgttcctattgacctacgaaacaggcctgcttggtataaggagaaa

SEQ ID NO: 23848 - DNA, 105 bp, Glycine max
  Clone ID: 701101657H1
tcaatttggaaaaatgacgcataaatcccaaactggatctgaaattttcagatctcctactttcacaccccctgttcggaaaccaagaaccgacacagacccagt

SEQ ID NO: 23849 - DNA, 271 bp, Glycine max
  Clone ID: 701101658H1
ctcgagccgctttcagctccggcaacctctcttccggcgccgccgccatctcggccgcgcaccaatcttcaatttgattacttgggtcaacgatttctgtcattctcaatcatggcaactagacttcagtttgaaaataattgtgaagttggagtcttctctaaacttaccaatgcctactgtttggttgccattggtggttctgaaagcttctacagtgtatttgaagccgagttagcaggtgttatcgctgtggtcaagacatccattg

SEQ ID NO: 23850 - DNA, 269 bp, Glycine max
  Clone ID: 701101659H1
ctttcttcctcttcctcagtagtgcgattttcgactctcttctccgcaactatgcctaaccctaaggtcttcttcgacatgaccatcggcggtcaacctgccggccgcatcgtgatggagctctacgccgacgtgactccgagcaccgccgagaacttccgcgcgctctgcaccggcgagaagggcgccgggcggagcggcaagcccctccactacaaaggctcgtccttccaccgcgtgatcccgaacttcatgtgccagggcggcga

SEQ ID NO: 23851 - DNA, 259 bp, Glycine max
  Clone ID: 701101660H1
tgttgctcaggttactagcaatgctctctcgcttattaatcagtatgctgcacaacactagggggagttgggaagaaagtttttgttttttgttttcgttttttcctttgaggggaaaaaaaaaaagaacaaacagttctatgtggttggttaatggttaattttgtgttttgtgtggtgtatgtaattgtgagtttttatagagatatggatcttgtgttgcttctgatcaaatgtgaaatatgagtcctgtttttgt

SEQ ID NO: 23852 - DNA, 129 bp, Glycine max
  Clone ID: 701101661H1
cgccagagctccatcaccggaacaagacccaggcaggtgtcgcagtacgcggatagaggacgctatataaatatatttgtccccgatgctctctatttcagccactcgtatattcttcctccgctcaac

SEQ ID NO: 23853 - DNA, 273 bp, Glycine max
  Clone ID: 701101662H1
cagcagttgtcgtattgcattgcgcagtttgtggagaaggattacaaactcgcggacacggttattaggggtttgttgaagtattggccagtcactaattgccagaaggaggtgctcttccttggggaactacaggaggtgctggaggccacgcagaccgcggagttccaacgctgcatggtccctctttttagacaggttgcccgctgcctcaatagttctcactttcaggttgcagaacgagctctctttttgtggaataatgagcatatt

SEQ ID NO: 23854 - DNA, 276 bp, Glycine max
  Clone ID: 701101663H1
atggcttcttcgtcttcagaatcggcggtgtcggagcgaagaggaataccaggggctcagttcgtagaggatgtccaaacttacctcactcaatcgggtctcgatgttcgttcagccctggcttttctccaagagagacttcagcagtacaaggtagtagaaatgaagcttcttgctcagcaaagggatcttcaggcaaagataccagatattgaaaagtgcttagacgttgttgctacattgaaagctaagaagggtactggtgaggaacttatt

SEQ ID NO: 23855 - DNA, 255 bp, Glycine max
  Clone ID: 701101668H1
caattcttgagctatgtttcagggataatagggcagggatgtacaaagaacgagagcgaggtggtgtttccgtttccgcctctaaatccgaggatcggaagcgaatcaacgacgttctcgataagcacttggaacgatcctctccttccacttcccgccccatcaacaccgcttccaagaattccaacctccaagtggaggaatctgagacggagagtgaagagtctgatgttagtggctctgatggggatgaca

SEQ ID NO: 23856 - DNA, 266 bp, Glycine max
  Clone ID: 701101669H1
gcaacgtctcatcttcgccggaaagcaacttgaggacgggcgcaccctcgccgactacaacatccagaaggaatcaacccttcacctcgtcctccgtctccgtggtggcatgcagatcttcgttaagaccctcaccggcaagactataaccctagaagtcgagagctccgacaccatcgacaacgtcaaggctaagatccaggacaaggagggtatccccccagaccagcagaggctgatcttcgccggcaagcagctcgaggacg

SEQ ID NO: 23857 - DNA, 269 bp, Glycine max
  Clone ID: 701101671H1
caactctgtcttatatgacgatgacttggaaagttatatgctttttaacatcgatggtaagcaagttctacaacagatggtcattgaagttggagacacctttaagaaaattctggaagagacagggaaagtgagggatgagcataccgaggacatttcagtttcccaagctatttcaattgtgctagataagcactctgatctaaggcaacaaggacttgcccatgaagtgctacaatggtttatatgcagaatggaagcttggtttg

SEQ ID NO: 23858 - DNA, 266 bp, Glycine max
  Clone ID: 701101673H1
gacacttcaggttcttctgaagggtacacttctgcagcttttcatcctgatggtcttattcttggaaccggcaccacagaatctctcgtcaagatttgggacgtaaaaagtcaggcaaatgttgctaggtttgatggacatgctgggccagtaactgccatatctttctctgagaatggatacttccttgcgactgctgctcatgatggtgttaagctttgggatctacgtaaattgaagaacttcaggaattttgctccatatga

SEQ ID NO: 23859 - DNA, 268 bp, Glycine max
  Clone ID: 701101674H1
gaaagatgggacgcgaagacggaagaagaagaagatgaagaagaatgcaaaatctgggggttttgaatcacttggtctgaatcccaatgtgttcaaaggaatcaagcgcaaagggtacaaagtgcccactccaattcagcggaagaccatgcccctcatcctttctggctccgacgtcgttgccatggctcgcacgggctctggcaaaacggcagcgtttcttgtccccatgcttcaccgcctcaatcagcatatccctcagtctggt

SEQ ID NO: 23860 - DNA, 266 bp, Glycine max
  Clone ID: 701101676H1
ctgcacttggccattagattctcctgttcctcaatggttgactctgatgcaacagtatttcaagcctcacttgccaaaaatgcactataagaggccacttaacttaatggaacaggaaaagctgcgacaccaagcggtcaatgttgttgctgctcgacttagtagggcggaacccccgcttagaaaggaggtacttgaatacacgtgtgacacagagtctcatctctggagtatgaggcgcacaaggcgagcttctaccgtctgat

SEQ ID NO: 23861 - DNA, 271 bp, Glycine max
  Clone ID: 701101641H1
gaacaattcaatggagcttgtatcccccagaataaattcagaaaatcataatctgcctcagtcaaactggcactttcctggttctagggagatgtcagatgttggagcaagaaaacctgatggttatgataatttgtcacaggatcctcatcaaggaggtattgttccgcattcacactctggagcacatggaccttcgattccagcaccacaacaaattcactcttctccgtttggtcggcctgtttatgttcctcctaatggtccatgg

SEQ ID NO: 23862 - DNA, 266 bp, Glycine max
  Clone ID: 701101595H1
cgcatttggagggccagcagaaagtaatgctgcaaactatggtgtggatggaaatgcagcggagagtgatcatgggagcaataatggacaggatggaagcaacaccttgacaatcagaatgataaatatggaaatggcaatgtggctgctgggagcattggaattggtggcattgataggaaaagctttgggaatggggcagatgaaggacggcttgcattgagagaggctgccttgaccaaatttcgtctaaagagaaaagaaag

SEQ ID NO: 23863 - DNA, 268 bp, Glycine max
  Clone ID: 701101596H1
cggatgcaagagagaaacttttggatgctattgaagatttgaagctggattcgctggttatgggaagcaggggcctcagcacaatccaaaggattatattgggaagtgtaagcaactttgtgatgacccatgcctcttgccctgtgactatcgtcaaggaaactagcaaggaaactagcagcagcaagtaaagatgatcaatttgggagagaacatttaaatttcacatattattttttttcttgcattgtacctgatctagttgggc

SEQ ID NO: 23864 - DNA, 273 bp, Glycine max
  Clone ID: 701101601H1
gtagcagtaggaagaggatgatcggcgtcggaaagatcaagcagtacagtaacgtcctcgacaagcccctcaccaagggcaagcaagaggttagtttgagcgcattcgcgttcttgttctcggagcttgttcagtacaaccaaacgcaggtcgacaatattggcgagcttgaacgaagactggaggatgctggatatgcggttggggctcgagttcttgagctgctttgccacagagataagggaaacagaagggagacacggctgttgggta

SEQ ID NO: 23865 - DNA, 273 bp, Glycine max
  Clone ID: 701101602H1
acaatatccagaaggaatctaccctccacttggtgctccgtcttcgtggtgggatgcaaatctttgtcaagaccttgactggaaagacaattacccttgaggtggagagttctgacaccattgacaatgtcaaggctaagattcaagacaaagagggtatcccaccagaccaacagaggctgatctttgctggaaagcagcttgaggatggccgtacccttgccgattacaacattcagaaagagtccaccctccacctggtgctccgtcttc

SEQ ID NO: 23866 - DNA, 270 bp, Glycine max
  Clone ID: 701101604H1
actcgagccgaatcggctcgagtggttttcgttgcttcctttcctcgttgcgacgccaatggcttctacgggcgaaaaaccaatggatgtcgaagatgcagagaatgaagtttcagtttcatctgctattctcaattcgatagcatctcggcagaatgaagttctttctccagaagatcttgcttgggttgaatcctgcctagttaaagattctgatatttcagacactgattggcatcctttgaaaaatgctttattagatattatcag

SEQ ID NO: 23867 - DNA, 272 bp, Glycine max
  Clone ID: 701101605H1
accgccgccacattcacaccacgcgccgccgcttccaatttccccggagacccaccctttgcatggcagtgagctttctggcgcgcgatgtatcggacctctgccttgggaagccgccgctgaggtcgctctccgccgccgccaccgtcgccgacgccttggccgcgctcaagagctccgaccacgagacccacgtcagcttgtggagcttctgcgagaacaagaacgaggttcgttgcgttgggaaactgtgcatggtcgatgttatttgc

SEQ ID NO: 23868 - DNA, 272 bp, Glycine max
  Clone ID: 701101606H1
tgttgcagcaacacgaactctccagatgagttttgttttaggagttggattgtcttttgcagttggatttggattgtactttggagctggaatcttctccaaaagtgttcttgttgtgcacttaatcagaataggcctcccgtttgttgctgccacacaaccaatcaattcattagcctttgtctttgatggtgtgaactatggggcatctgattttgcatattctgcatactccttggtcaccgtgtcattggcaagtgttgcttcattgt

SEQ ID NO: 23869 - DNA, 276 bp, Glycine max
  Clone ID: 701101607H1
gcgtcatgggcagctccaccgcctaccccgccaccaaacgcggccttaaaacccttctcctggaacagttcgacttcctccaccactgtggctcctcccacggcgaatcccgcaccatccgcctcacctatccccaccactactactaccctttagtcatggactcttaccgcctctggcaagaggcgcaggcccaagtcggctaccagatctacttcaaggcccatcacatggacatggcccatcacaacgagcccgccatgcgcgccctcatcg

SEQ ID NO: 23870 - DNA, 277 bp, Glycine max
  Clone ID: 701101608H1
aaaaagtagtttgctttaagagagcatgtgagtagttgggataaggaagccatctttgaaacctttgacattttgaaattttgataaaacgttacatcgttgcaacttcctagatgggttaattgaaagatgtagtgggcaaagtgtctgtgtccaaagattgtatcagccaactagatgttgctagctaatgcaagatttgttagctgatatatagcactttgaagaacttttcagttagcagtcacccgtggaaggcttgggttatcaaacaagt

SEQ ID NO: 23871 - DNA, 133 bp, Glycine max
  Clone ID: 701101615H1
caaacccatcattccccgccgcggcctcgtcgtcggcaactactgccatgacgtcctccaccgcgacggcgatgccgtcgccgagaccctcggctgcgctgcctccttcatctccgtcatcctcgacgccctc

SEQ ID NO: 23872 - DNA, 279 bp, Glycine max
  Clone ID: 701101616H1
gacgccataagtaagagcaagtcgaaaagttcctctctctctcacacacacacatcccagccatgagcctcttcggtataggcagaaaccagagaacattccgcccgaaaaaaagtactccttctggaagtaagggagctcaacttcgaaaacatattgatgccacgttaggtagtggaaatctgagggaagcagtaaagctacctcctggggaggatttaaatgagtggctagctgtcaacactgttgatttcttcaatcaggtgaatctgctttatg

SEQ ID NO: 23873 - DNA, 274 bp, Glycine max
  Clone ID: 701101617H1
tctggaacaatggcttgaagtggaagctcataactttcacccaccactctacaacttggttattaatgttctgtttgcgccattaacgggggctccttcggaccaaaaagtgatagaagaaagtgataaaaagattgagaaggtgctggatgtttatgaggagaggctgtcaaagagcaagtacttggctggtgacttcttcagccttgctgatcttagccacctcccatttggtcactatttggtgaaccaaaccgggagaggaaatttggtc

SEQ ID NO: 23874 - DNA, 233 bp, Glycine max
  Clone ID: 701101618H1
cccattacaattctctgtatttcagggttcacaattcacacgttgaattgaaatttggaaatcgtgacaccaaccctacaccaccatggcctccgtagacaaattttgggcttttgccctcgctcttctcctccttgcctcccctctcctccaagttgctaggtgtcagtcagactccgaagatgtagtggaggctgctgaatcctcaagtgatatcggcattgtgggggatg

SEQ ID NO: 23875 - DNA, 268 bp, Glycine max
  Clone ID: 701101619H1
caaattcccaattacccttcccaattctcaccaaaacctaatactcccacaccaatcttcgaccctggacgccgattcacaacctcaacaactcgaagagagaacagaggagcaagaactgaagtacctggaattcgtgcaattcgcgaccatacaggctctgatgcgctgcgccatcctctactcatacgccaaggagcgcgcgggtactctgaagcccggtgtcgacacgtggaggaggcgtgaagaccgtcgtggctcggtctac

SEQ ID NO: 23876 - DNA, 272 bp, Glycine max
  Clone ID: 701101620H1
cgacacctcccgtgtagttgttgctaaccaaaacgaccccacgccccatccccagtacaaatcaggtctcaacccctcgcccccaatttcctgtcgcctcccccttcttcactcccacccttcgttgacctcctattctcccctcatcggagctcaaatctccgatcccttcatccatatcgcttcaccgcaactttctcttcatccatcgcaagatctagttgaatctcaaccgcgctcctccgattcgaagctccactcactcaaatcct

SEQ ID NO: 23877 - DNA, 275 bp, Glycine max
  Clone ID: 701101622H1
aaaaaacaacagtggtacgtgatgccaccgaagttcgatccctcgcaggtggtggacgtgttcgtccgagtcaccggcggcgaagtcggcgcggcgagttctctcgccccgaagatcggtcccttgggactctccccaaagaagatcggagaggatattgcgaaggaaaccgcgaacgactggaagggcctccgcgtgacggtgaagctaaccgtgcagaaccggcaggcgaaagtgacggtggtgccatccgccgccgcgctggtcatcaaggc

SEQ ID NO: 23878 - DNA, 86 bp, Glycine max
  Clone ID: 701101624H1
gggaaccccagttatcatggaagacacacagcagtaactgctcctcggactataaattttcaacctattgctgtcccttccatcac

SEQ ID NO: 23879 - DNA, 274 bp, Glycine max
  Clone ID: 701101625H1
cacttccggtattgttctctattttggtgacatgttgttgcttactattaaaaagttacatgaattattgatgtcatcagagttagttactgcagaatatgaaataagtagaagtgagataagcattataattcaggggcttgtgcttggtcttctgctatatccaatagctttgaaatatattctccaaatatgggagtggtctataaatacaacttctgctgaagcaagaagatactatgagattgggaaatctcttatgtttgttgcttct

SEQ ID NO: 23880 - DNA, 273 bp, Glycine max
  Clone ID: 701101628H1
gcaactttccacttcatccaacacatctcataagatagtgaatatttctgttaatgtaaatgcatggaagccaccacaacatcaggaaccacgagaggttacagaattagatggtaatagaactttttacaatgaaagagctcccagatctagtacacggccagtgaaggagaatgccaacactctaaaagttagtaatgggaatgcaaacctgctcttgatgttcagaagagtttagcaaggctcacttaaccgcttctggttctaatgctg

SEQ ID NO: 23881 - DNA, 277 bp, Glycine max
  Clone ID: 701101630H1
tggctttctttattctctccttcctcttccttcttcttgtttcatctgccactgcttgtgatcgctgcttgtatcaatccaaggcttcctatttctccaaagcttctgctctttcatctggggcatgtgggtatggctctttggcactagacataagtggtggacaccttgcagctggtgtggattctctcttcaaaaatggagcaggttgtggtgcctgctttcagataagatgcaagaacccaactctatgtagcaaagaaggtaccaaagtggt

SEQ ID NO: 23882 - DNA, 256 bp, Glycine max
  Clone ID: 701101633H1
cttctctttgttcttctaccttattttctttccctagtcaaggagattcatctctgcagcaggttgttttagaaaagaaaaaatgctgaagatttgctgcattggggctggatatgtggggggtccaacaatggcagtcattgcactgaaatggccctcaattgaagtggctgttgttgacatctctaaatccaggattgcagcatggaacagtgaccagctccctatctatgagccatgccttgatgatgtggtg

SEQ ID NO: 23883 - DNA, 271 bp, Glycine max
  Clone ID: 701101635H1
ctcatcctgactctgaaacacaaattggagcacatagtgtcttctccatggtgcttatgccatccatgtgttctccttggttagaccccaaaacaaagattgctcagaatgacaacttctccactcagcatgaaactctttctggagctgaaaactcgaatgggaaattggaagaaggaaaggcaatagccagtgtcaatgggaagaaatatgtgattcatccatatcgtggctacagctttactccgaagctaactgatggagaagatga

SEQ ID NO: 23884 - DNA, 268 bp, Glycine max
  Clone ID: 701101638H1
ggttgggagaaagcaaaggcctccaagcctccaatgttgcctgatgactttgacaaaccggagtttgccacggtcaacattcagcgtgatctgttctatggttacgatactctcatggagaatgtctctgatccttctcacattgagtttgctcatcacaaggtcacaggaaggagagacagagccaagcctctgccattcaagatggattctcgtggttcatggggcttctctggagctaatgaagggaacccacagatcagtgcca

SEQ ID NO: 23885 - DNA, 262 bp, Glycine max
  Clone ID: 701101593H1
gtaccctacacttagttgttgtgttgctgtgcacccggtgagcggtgacctcttccgctttgatcttcttctgtccagggtaaccaatctggttacttgggtcaaagatttctggcatctctgtcatggcaactagacttcagtttgagaataattgtgaagttggagtcttctcaaaacttaccaatgcctattgtttggttgctattggaggttccgaaaacttctacagtgcatttgaggctgagttagcagatgttat

SEQ ID NO: 23886 - DNA, 260 bp, Glycine max
  Clone ID: 701101566H1
ctcacttttcatccttcgatcatacacttagttgcttccaattaagatggttctgctagagaagctctgggatgatgttgtggctggccctcaacctgagcgtggccttggcaagctcagaaaactcaccaccctcaaaactattgatgaaggagaaagtagcaagctgcagaagacgttgtcgatgccgtcgacaccaacaaccccgatgactccgacgactcgaacgacaccgggatcggcccgtaaagctgacaacg

SEQ ID NO: 23887 - DNA, 270 bp, Glycine max
  Clone ID: 701101567H1
gcaaaagagcatactgtgaagtgtgactggagaactgttcccacatctgacgcagataatttagcacgagacacaatgattgacactgtgagtgcctatgaacttatcgagcacccagattactcctgtcgttttggtgatattgtgttcaaggttgctcaaaaacttggttatgaagctgatagagataatgcaaagtcagtggactgacttgaatgtggaagttcctctgataaactgggaccaaatcagttatccgaataagtctgt

SEQ ID NO: 23888 - DNA, 270 bp, Glycine max
  Clone ID: 701101568H1
cgagaaaaatgctccatggttatcggtgccgcaatttggggactgggatcagaagggccaagtgccggactactcacttgatttctcaaagatccgggaaactaggaagcagaacaagacaaatatttccagggcaagccttggcaatgaagaagaattcatggattcaacaacctccagcagcgtcaacactgcccacagcagtgagcaccctcaaccccactaccatcaaacccactctccaactgcaaggaagagcttcctcagcta

SEQ ID NO: 23889 - DNA, 265 bp, Glycine max
  Clone ID: 701101569H1
cacacaacagccatggagttttcaggaggccacgaaacaggataatttttcctcaggaaagggtatgatgaaaactgaaaactcttcttccatgcagagtttttcccctgagattgctagtgtccaaactaaccatagcaatgggtttcaatccgatcatggcacttaccccccacaatctcagactttaagtagaaggtcagatgatgggtacaattggaggaaatatggtcaaaacccagtgaagggaagtgaaaatccaaga

SEQ ID NO: 23890 - DNA, 266 bp, Glycine max
  Clone ID: 701101570H1
gacaatcctattaagaggtggtacaaaagcagcaagtacttcctgcaggataattggcagagaacttgggtattgctactgtggattggcgtgatgttaggtctatttgcctacaaatttgtgcagtatagaagacaacctgcatatgaggtgatgggccattgtgtatgcatggccaaaggtgcagccgaaacacttaaattgaacatggctattatcttgctaccggtttgccgaaacaccatcacttggctaaggaataagac

SEQ ID NO: 23891 - DNA, 262 bp, Glycine max
  Clone ID: 701101571H1
attgccttcaaatcacacactctcttcaatttctagggttttgctattgctttgcctccgttccccctttctcacaaaaacaacgccttttctcttctccttcgtatctattctttgcgtttcgtctttggttgattgatggcattcacagcgtaattcgttgctgcattttaatcgatttatctaaccaggactgaatgacctaatggtgcctaaaggtgggaaacagaagtctagtagtagtagtagtaaatcaattttt

SEQ ID NO: 23892 - DNA, 267 bp, Glycine max
  Clone ID: 701101572H1
cctaaacctaaacctaaacctaaacataaactgaatttcccaaatccccttcccaattttcaccaaaacctaatactcccaaaccaatcttcgatcatggccgccgaatcagaacctcaactactcgaagagagaagagaggagcaagaacttaagtacctggaatttgtgcaattcgcgaccatccaggccctgatgcgctgcgccatcctctactcctacgccaaggagcgcgcgggtcctctgaagcccggcgtcaacaccgtc

SEQ ID NO: 23893 - DNA, 267 bp, Glycine max
  Clone ID: 701101573H1
gaacagtgaagagtgagagagagagagagagagaggcccttggaatccaaaaatgagagaaatcatcagcattcacataggtcaggccgggatccaggttggcaactcctgctgggaactctactgcctggaacatggcatccagcccgatggcatgatgccaagtgactcctccttcggtgtagcccacgacgccttcaacaccttcttcagcgaaaccggatccggcaagcacgtccctcgcgccgtcttcgtcgatctcgagcc

SEQ ID NO: 23894 - DNA, 264 bp, Glycine max
  Clone ID: 701101574H1
ctgatggtgtgagccacacagttcccatatatgaagggtatgctcttcctcatgcaattcttcggttggaccttgctggccgtgatttaacggagtacttggtgaaaatccttactgagagaggatactccttcagcacctctgctgaaaaggaaattgtccgtgatgtgaaggagaaattggcatatgtggcccttgattttgaacaagaaatggagactactaagagtagttctgcagtggaaaagagctatgaattgcctg

SEQ ID NO: 23895 - DNA, 264 bp, Glycine max
  Clone ID: 701101577H1
ctcgagccgcgatcttgttattgtaaaatataataacttttttatatcgtgatcaagattcgccgagggagagccaccgccgccgtcgtggatccgacggcggagcaggcgaaggagactctgttccgcggcgtcaggaagcggccgtgggggcgattcgcggcggagattcgagatccgtggaagaagcatcgcgtgtggctggggacgttcgattccgccgaggatgccgcgcgggcttacgacaaggctgcccgatccttc

SEQ ID NO: 23896 - DNA, 262 bp, Glycine max
  Clone ID: 701101578H1
cttcattttgactctctctctctctctgattgcttccttttcccttttattttgctctcttctctgcacaacaattccttctcattccagatattccaaccatcgacctatctcaattctcaaccttaacctctcagaatgtcttacgcttatctcttcaaatacatcatcatcggtgacaccggagttgggaagtcttgtcttctacttcaattcacagacaagcgctttcagcccgtccatgacttgaccatcggtgttg

SEQ ID NO: 23897 - DNA, 264 bp, Glycine max
  Clone ID: 701101581H1
caagtttggaaactctactttcctcattgactcaattccagtggcagagtttcaaggtcgaccactagccgatcaccctgctgtgaaaaatggacgtccacctggtgctctcaccatagcccgcgatcttcttgatgcatcaactgttgcggaagccatcagtgtcatctcctgttggtatgaggacaagactgagtggggaaatcgcgttggatggatctatggatctgtgacagaggatgtggtcactgggtataggatgca

SEQ ID NO: 23898 - DNA, 266 bp, Glycine max
  Clone ID: 701101582H1
ctttattttaaaaatcacttaagaaaaaacgcacactttgccaactaaaacagtaaaacctccccaacaacacgcataaattgacagaaaactacggcaccagaaggttctgattctgaattctgagctttctagttttcctatcatccaatctctttagttagctcctgctcctctttctgccagaagcttcaaggaaaaacaaagaaatgagacttggatgtgcttcttggagattcatcctatgcaccctagttgtcttgttg

SEQ ID NO: 23899 - DNA, 267 bp, Glycine max
  Clone ID: 701101583H1
ctcaccctctctgggctctccctctgctgctccaccgtctccgccgccgcctctgccaccggtggtggttagcccttgtgctgcctgcaagatcctccgccgtaggtgtgtggagaagtgtgtgttggctccatatttccctcccactgatcctctcaagttcaccattgctcatagagtctttggagccagcaacatcatcaagttcttgcaggaactgccagaatcccagagagaagatgctgtgagcagcatggtttatgaggc

SEQ ID NO: 23900 - DNA, 264 bp, Glycine max
  Clone ID: 701101584H1
gtctgatatatctgattttgaatttgacccttgcggatattcaatgaatggcctagaagggagtgctatatccaccatccatgtcactcctgaagatgggttcagttacgcaagttttgaagctgttggttatgactttaatgacatggctctaggtgaacttgtggaaaggactttagcttgcttttgtccagcagagttttctgttgctttgcacattgacatgcatggtgagaaacttaatagatttcccttagacatcaa

SEQ ID NO: 23901 - DNA, 264 bp, Glycine max
  Clone ID: 701101585H1
ctttcattcgtgaaggattccagtttgattatgtctttgattggaccattttgaactatcagcaatctcaaattgccacacctcctgctcgtgctattggtcctgctgctggaccaagttctgggctgccaccagctgttgtaaatgctgatagacagacaggtggggaaaacagtaggcatactggttggtcttcatctgatcctgctcgaagaagaaactctggacctattgcaaatgatggaatgttgtcaagacaaaaag

SEQ ID NO: 23902 - DNA, 266 bp, Glycine max
  Clone ID: 701101586H1
tggtggtggacgcgattctggcatgagttctgagactatcaattcctccactcaaagaacttcaatgagcaacgagagcgtttgcagcaccagcttcagccgtctctccttcgatctccctcctccttcttcttcccctgagacccgcttcgtcaaaccccaccgctcctccgacttcgcctactccgccatcctccgccgcaagtccgccctcaccttccgcgacttccacctcctccgccgcattggcgccggcgacatcggca

SEQ ID NO: 23903 - DNA, 266 bp, Glycine max
  Clone ID: 701101587H1
cgccgactcggttgctatcagcgagtgagagtgagtgagtggttctcttgcagcaacaaggtttagtgacaccaaacagacgggaaatgggtcgtggggtcagtgctggtggtggacagagttccttggattatctctttggcagtggggtacctgccagcagtgcaaatggtgctcgcactcaaaatgcaagtgctccttcaccaccggttgataagcaaagtccagcaccagcaccagcaccagcacctgcacctgcagcagca

SEQ ID NO: 23904 - DNA, 267 bp, Glycine max
  Clone ID: 701101588H1
ctcaccccagtttcactttctcattattttctctcctattgataaagaaacagagagagagagaaaaaaatgcctgcggtaggaggtattagcaacggagggggcaaggagtaccctggaagcctcactccttttgtgacggtaacatgtatagttgccgccatgggtgggttaatcttcggttacgatatcggaatttcaggtggggtgacatccatggatccgtttctgctcaagtttttcccgtcggtgttccggaagaagaat

SEQ ID NO: 23905 - DNA, 261 bp, Glycine max
  Clone ID: 701101589H1
gaataaaactacaaaaacaaaaacaaaagcccacatgcatgccaattcctcctcgttacttttacctgcaaaagtgccaagtccttgcatcagttctctattgttttggcctcaaagttcagatcatgctttccttttcatttaagaatatctcagaatttgagtacactgctaatgtccagatggaattggagtaaaatgtggataacaaacactttaaatagaagttactgacatttgttgttccaaaaaagagagaaa

SEQ ID NO: 23906 - DNA, 263 bp, Glycine max
  Clone ID: 701101590H1
cacccttacaacgcaacaacataacgttgctaattgcttgcacttcctcttatggttgcttcctttgtttctcattagctgttttggtttttgtcttagttctacacctttcctcatttccgcagtagcaacctgcgaaccaatctctctgagaaaaaaaaaaatggcgtcgaacgggaatggcagcgttgcgaacgggaacgggaccgctaggaacggactggcgaagattcagacgcacaagaggcataacggaatttgtc

SEQ ID NO: 23907 - DNA, 251 bp, Glycine max
  Clone ID: 701101592H1
cggatcttgacatggttgatgctgccatagtagaagggaaaacaaaagtgctttacttcgaatctgtttccaaccccacccttacggttgcgaacatacctgaactgtgccacatggcacaccggaagggagtgacggtggtggtggacaacacgttcgcgcccatggtgctttcgccagcgcgtcttggtgctgatgttgtcgttcacagtatctccaagttcatcagcggtggggccgatatcattgca

SEQ ID NO: 23908 - DNA, 244 bp, Glycine max
  Clone ID: 701101565H1
ctcatggtgatgctggtctcactggaagaaagatcatcattgatacctatggtgggtggggtgctcatggtggaggtgccttttcagggaaggaccctaccaaggttgacagaagtggtgcctatatcgtgaggcaggctgcaaagagtgttgtggcaaatggccttgccagaaggtgcattgtccaagtttcctatgccattggtgtccctgagcccttgtcagtgttggtggacacttatgg

SEQ ID NO: 23909 - DNA, 241 bp, Glycine max
  Clone ID: 701101534H1
ctctttttctctaagtctaaggggtgccctgagatcactttgagcaatggtgaaggctgtggcagttcttggcagcagcgatggtgtcactggaactattttcttcactcaggagtgaaatggtccaaccaccgtaactggatctcttgctggtcttaaggctggtctccatggcttccatgtccatgccttgggggacactaccaatggtggcctgtcaactggagcgcatttcaatcct

SEQ ID NO: 23910 - DNA, 269 bp, Glycine max
  Clone ID: 701101537H1
ctcgagccgattctcataagataactaactcactttgtgtgatagcgttctcattctcatggctattaccggcgatattttccggcagagcataacggaaatgcttgcggagtccccttccggtgcgccagaacttcacgttctcgccgtcgatgacagcctcgttgatcgcaaggtgatcgaacggttgctgaagatttcttcctgcaaagtgacggttgtggagagtggaacgcgcgctcttcagtatcttgggttggagggagaga

SEQ ID NO: 23911 - DNA, 267 bp, Glycine max
  Clone ID: 701101538H1
cagatggtgaggacccatttggtgattcaaggcgaattgcctgcaaaaggtgtggtggctttcatgtctggatacacaccaagaaacaaaagtctcgggcaagatggtgccaggattgccaagattttcatcaagctaaggatggtgatggatgggttgaacaatcttcccaaccatttctttttggcttattgcagaaggttgatgctccttcagcatatgtgtgtgctggtagcaggatatatgatgccaccgaatggtatatct

SEQ ID NO: 23912 - DNA, 256 bp, Glycine max
  Clone ID: 701101539H1
cagatgggcaaattcaatctgtcccatagagttgttttggcaccgctgaccagacagacgtcttacgacaacgtcccacaaccccatgccatcctctactactcccagagaacttccaacggaggccttctcattactgaagccactggcgtctctgacacggctcaaggctatccgcaaacccctggcatatggactaaagaccatgttcaagcttggaaacccattgtcgatgccgtccacgccaaaggggtgt

SEQ ID NO: 23913 - DNA, 265 bp, Glycine max
  Clone ID: 701101540H1
gaacaggatcttgcctttgtcacccaagccaacaaatcaagatgcatatttgctcgctccaaatatgttgaggtttgacgatgtcactgccactatcctcactattattttcggttctgaagaaccctctggtgaaattcttgctggttacaccttgtggcatcgcaaagttgatgatgtggactatcccatggacccaacttgcacctcgctcttaccaaatagaaggttcagtgtctcgggcctaattccaggtacagaatac

SEQ ID NO: 23914 - DNA, 267 bp, Glycine max
  Clone ID: 701101542H1
cgttggagctatagctgctgggaatgctgtggttctaaaaccatcagaaattgctcctgcctcatcatcattattattaaaattgatagagaagtattgtgataactcatttataagagttgtggagggggcagttgatgaaacaaccgcactattgcagcaaaagtgggacaagattttctacacaggcaatggaaaagtgggaagaatagtgatgactgctgctgcaaaacaccttacaccagttgtgctggagcttggaggaaa

SEQ ID NO: 23915 - DNA, 265 bp, Glycine max
  Clone ID: 701101543H1
ggccagttggggtccttatgtgatactttaggtaataatgagcattatagaatttttatggaaatgcattttaaggaaacaagttgagaaaggcttggctgttatacttggtatcatgtctgtagcaattcttttagctgaggcaactcttctgcctagcattgatctatcgcttttttccattcttataaaatcggttggaacacaggaggtccttgtgcaggtgtttgcttttgttcctctcatgtacatgtgcatctgcaca

SEQ ID NO: 23916 - DNA, 109 bp, Glycine max
  Clone ID: 701101545H1
caaactgttaagtgttaacaaacattgctaaaactaaatgttatagttctgattctgatttctcactagtaaaattgaggatcggcattcagcaatgatgaattccaca

SEQ ID NO: 23917 - DNA, 267 bp, Glycine max
  Clone ID: 701101546H1
ctcgagccgtccttagaagacagcggctattgggattttctcgattactctttcattgatcacagcgccccctgatttcctttggtccaataatactattagtgtgaacaccgaagttgacattccaggtgatgctgctgcgtgtcaagagaacaccaagaagaggggacatgctgattcaagctgccaggtgggatctaaagcttgccgtgagaagttgcggagggagagactcaatgaaaggttctgtgacttgagctctgtttt

SEQ ID NO: 23918 - DNA, 268 bp, Glycine max
  Clone ID: 701101548H1
atgtcctgtctggtggtcatggactcatggtgcaaggatatgatccagttataaaagttcttgcaaaagatattgacatacgcttgaaccacagggtgaaaaagatatctagtggttacaacaaggtaatggtgacggtcgaggatggcaggaactttgttgctgatgctgctatcataactgttcctattggaatcctaaaagcgaatttgattgaatttgaaccaaaacttcctgattggaaggtttcagcaatttcagatcttgg

SEQ ID NO: 23919 - DNA, 268 bp, Glycine max
  Clone ID: 701101549H1
caatgatcacattcaaacccacaccaacaacagcaccagcaacatggttcgaaacccgaagaaacggtcaagagcttctaggcgtgcacctaccactgtgctaaccacagacaccaccaatttccgagccatggttcaggaatttactggcatcccagcacaacccctcacatcctcgtctttcccgagaaccaggttggatctctttgcttccgccgcaacaccaactttgatgagatccaacgttaacgttaaccctttggaccct

SEQ ID NO: 23920 - DNA, 273 bp, Glycine max
  Clone ID: 701101551H1
cttgttttgtcatctaagacaacccagtgagagtaagcacacattgctcagcaacaatggcagcctactcaagccatgctttgaaaaccatccctttttcttcctttgtgaagcctgtcagtaccaaaccaacatcattcttcacaccttcacctaccaaacctttcttacccttcacctcaccaaaccactctctcaccaaaaatctcaagctgaactccactttgccacacttttgcttgtcttcagttcccaagaaatctttcacttgta

SEQ ID NO: 23921 - DNA, 269 bp, Glycine max
  Clone ID: 701101552H1
caacaattgggcctgatgtcgagtccaaacagataggtaaggcccaagggttttacctatccgcaacccaaaggcccggtttggagttggagatagtcatggggatggccttgaccttcttagaaggcgaatttaacggtagcagtttaaacgtgttggggagaaacaaaatcttcaatgaggtgagggagttgcctattattggtggcacgggtgagtttcgcttcgcacgtggctatatcctagctaggagtgtcaaggtcgattac

SEQ ID NO: 23922 - DNA, 269 bp, Glycine max
  Clone ID: 701101553H1
ccacttttcagttcccactccctttctctctccccaacccaaaaatggcatcaaaattgaccctcattgcgttggttctcgcggtggccctgtgcgccgttgatctaacccatagcgcatcagcatcctcccctcacgcgccaggccctccgtggactgcaccaacctcgtcctcaccatggccgactgcttgtccttcgtcaccaacggtagcaccgtcaccaagccagagggcacatgctgctccggtttgaaatctgttctcaaaa

SEQ ID NO: 23923 - DNA, 269 bp, Glycine max
  Clone ID: 701101554H1
cattgtttaaacctaattctcatttcttcatcgttcgattcttctcctcctaaagatgcagatcttcgtgaaaactttgaccggtaagaccatcacccttgaggtggagtcctccgacaccatcgataacgtgaaagctaagattcaagacaaggaagggatcccacctgaccagcagagacttatctttgcgggtaaacagcttgaggatggtcgaacccttgccgactacaacatccaaaaggaatccactctccacctcgtgcttc

SEQ ID NO: 23924 - DNA, 270 bp, Glycine max
  Clone ID: 701101555H1
gcaatatgccgtgacgcagtcgacgaagcgatgaggattcaggagctcattaagaaaccactcacttcagttcctcaacgtgacattcacctagacggtcgtgaaccttcacttctcgcaggggaaacctttagtcacgcagtccgaaccatcgacctgaaaaaattgatccatggagaagatatagaacttgagtgaggtgaattgacctcagcttggagggattggggtttctttcagttggtggagcatggaataagctcagtagtg

SEQ ID NO: 23925 - DNA, 267 bp, Glycine max
  Clone ID: 701101556H1
attcaaatcagtttcctcaaaatcgcacccactttgcttcgcatcacaattcgaaagaaactggtttcgatggtgcgagctccggatccgcagcatcgggaatcgaacacgcccttagttcttgaagcccacagaatggggaatcaagcaccccattggtggtaaatcaggtacagggagagggtttgacaaatgatgggcttattcctcagatattttcatctatgccagctctcaatgaagctgcttcttatcttgcacaaacaa

SEQ ID NO: 23926 - DNA, 265 bp, Glycine max
  Clone ID: 701101558H1
ctcgttaattccgcgaacgagcttctgcccttcaaattaaccatggagaatattggtgaggagtacggctactggccggagaacgacatgcttttccaaaacgaagaccttggcagctgggcgataatggatgaggcagcgttatcagggtcagggtactatgattcaagctccccggacggtactggtgcttcttcatcggtggcatctaagaacattgtctccgagaggaatagaaggaagaagctcaacgataggctttttg

SEQ ID NO: 23927 - DNA, 266 bp, Glycine max
  Clone ID: 701101559H1
caaagctcctcctgttattgcttggtggtccgaggaggttcagacgaagaagaagatgagctaggagacattaatattaactcttcaattttgtagtccaattgatccatccatggtgggggaatcaagaaagtgggtgatacttttggcatcaatatgggtgcaggcattcacagggacaaactttgacttctcatcatactcatctgagctcaaatctgtgcttgacataactcagcttcagctcaattacctctctgtggcct

SEQ ID NO: 23928 - DNA, 266 bp, Glycine max
  Clone ID: 701101560H1
ccaacggcatcctcgtctcatacgcctacaccggcggcctgcggttgccgcccaacgtctccgactcggctaagcagccgtaccggttcgagtcgacggtgacggttctcaacaacggcctcgacgagctcaagtcgtggaaggtcttcgttgggttcgaccacgacgagttgttggtctccgcctccaatgctgtgctcgccgacggcaccaccctccccgccgccgtcggaaacggcaccgtcttcgccggtttccccatgact

SEQ ID NO: 23929 - DNA, 264 bp, Glycine max
  Clone ID: 701101561H1
gttccgagaacaacaagcgccttatccatttctccacttgcgaagtgtacgggaaaacgattggagcctttctccctaaagatagtcctcttcgcaaggatccggcatactatgttcttaaagaagacgaatctccttgcatttttggttctatcgagaagcagaggtggtcttatgcatgtgcaaaacagttgattgacaggctgatttttgctgagggtgctgaaaatggcttggagttcacaattgtaaggccatttaact

SEQ ID NO: 23930 - DNA, 264 bp, Glycine max
  Clone ID: 701101562H1
aattgctttgctgtaagtttctgattcctttcttcagaattccaagttttcatttcgttagggacaaaagattgtgagatagagtatggctggaaaaggcgagggtcctgctatcggaatcgatttgggaacgacgtactcttgcgtcggcgtgtggcaacacgatcgtgttgaaatcatagccaacgatcagggtaatagaactaccccatcctacgtggctttcaccgatacagaacggttgatcggcgatgcggcgaagaa

SEQ ID NO: 23931 - DNA, 265 bp, Glycine max
  Clone ID: 701101563H1
cttaggaactgtatggagccggtggagaaatgtttgacggatgctagaatcgacaaaagaagtgttgatgatgttgtccttgttggtggttctaccagaattcccaaggttcaacaactgctgcaggacttctttaatggaaaggagctgtgcaagagcatcaatcctgatgaagctgttgcatatggtgctgctgttcaggctgcaattttaagtggtgagggcaatgagaaggttcaggatctactcctcctaaatgtcaccc

SEQ ID NO: 23932 - DNA, 259 bp, Glycine max
  Clone ID: 701101533H1
tgagcagttggctcggaagtttgaggaagaaacgggacttgagggagttattgtgtgcactcgaagtcctttgaatggaaaactctaccctcttcgcttgcagcttcctccaaacaatgtcaccatgcaggttgttttggttcttccctcgtctaaagtggcaagagaatttgaggagcaaggtatactatgacaagttagattattgtgggagtcttgaattgaatctactgaaatgcaacttgtgattcaagcgtgt

SEQ ID NO: 23933 - DNA, 275 bp, Glycine max
  Clone ID: 701101504H1
ctactactactcatcattgtctcaaaaaccttctctctcaacaaacacctacaacaacaacaaaaaaagagaaattttttagaacaatggaggcatcaaagatgaagtttttcttggttttggtgattgccatgttggcgatggtagcaactggggtttcagctgctgaggcacctgccccaggtccttcatccgatgccaccaccttctttgtacccactgctcttgcttctctctttgttcttgcatttggccttctcttctaattaattctc

SEQ ID NO: 23934 - DNA, 271 bp, Glycine max
  Clone ID: 701101505H1
cggctcgagggatgatgctagcagagcactggaagctacaaatatgagcaagttactggatcgacttatttctgttgaatttgctgttaaagatgatgatgataggagaaatggatatagccctgagagaggccgtgatcgtcaccgtgatagaagccgtgatggaatgcgatctcctagtccttatcgtagagaaaggggtagtcctgattatggccgtgggcccagtccatatcagagagagaggggcagccctgactatggccgtgac

SEQ ID NO: 23935 - DNA, 271 bp, Glycine max
  Clone ID: 701101506H1
ccttaattcaacaatggcagataactcaattagcttattttctccatacaacaagatggcccacttcaacctctctcatagggtggtattggctcccatgaccagatgcagagcgctcaatgggactccactggcagcacatgctgaatactacgctcagagatcaacaccgggtggatttctcatcactgaaggcaccttgatctctccaacttcttctgggtttcctcatgttcctggaatatactcagatgaacaggtagaggcatgg

SEQ ID NO: 23936 - DNA, 269 bp, Glycine max
  Clone ID: 701101507H1
cagatccactgctgcagaatccaatttgtgacactaaatctaagttactatgactgcgcagacccaagaggcagttcttgcgcaacacctcgaacagcaaaagatccatgatgatgaacctgtcgtcgaggatgatgatgacgaggaagtggatgatgatgatgacgatgaggatgatgaccatgacgaaggactcgaaggtgatgcatctggtaggtcgaagcagaccagaagtgaaaagaagagtcgcaaggcaatgcttaaacttg

SEQ ID NO: 23937 - DNA, 267 bp, Glycine max
  Clone ID: 701101508H1
tcgagctgacatgaacctcatcactgatgatgatttcagggaatttgttgatggggtgcacagaggttgcacgatcacaattgtgtctgattctcgccacagtggtggcctacttgaagaagctaaggagcagataggagagagcacaaagggagaggaggaacaatctggctctggctttggattttcaagttttctacaccggaccgtggaagatgccatcgagtctcgcggattccatatcccttcagcattgcgccacaacag

SEQ ID NO: 23938 - DNA, 272 bp, Glycine max
  Clone ID: 701101509H1
ctttgctcaacaaactgctgagaacattgctgcgctcctcgctcaccagtctggtttctactatgatatttgggtggatggggaaaagattttgacatcagaaccacctgaagtagttcaggcacgaaatgacaattctcatggtacaaacttcccggattcccccgagcccatctatggaactcagttcttgccaaggaaattcaaaattgctgttactgtgccaactgataactccgtggacattctcacaaatgatattggtgttgttg

SEQ ID NO: 23939 - DNA, 269 bp, Glycine max
  Clone ID: 701101510H1
gttctcaggaaactgaaccattgggaacagcaggtcctctggctcttgccagggataagctgatagatgactctggagaaccctttttttgttctcaacagtgatgttatcagtgagtatccactcaaagaaatgattgaattccatacaaaccatggaggagaggcttccataatggtaaccaaggttgacgagccatcaaagtacggcgtggttgtgatggaagagagcacagggcaggttgataaatttgttgaaaaaccgaaatt

SEQ ID NO: 23940 - DNA, 269 bp, Glycine max
  Clone ID: 701101511H1
cctcgagccgaatcggctcgagttttggagttggtaactgggaagacccctcttgacccagactatggagaaaatgatctaaccaaatgggttcagtccacattagatcagaaaggactggatgaggtgattgatcccactttggatattcaatttagggaagaaatcagtaaggtactcagcgtggggcttcattgcactaactctcttcctataacccgcccttcaatgcgtggtgtggttaaaaagctgaaggaagtaactgacct

SEQ ID NO: 23941 - DNA, 269 bp, Glycine max
  Clone ID: 701101512H1
atttcacccaaatataaatagcaatggaagcatttgccttgacatattgaaggagcagtggagccctgcgctaactatttcaaaggtgttgctctcgatttgttccctgttgacggaccctaatcctgatgatcctttggtccccgaaatagcccacatctacaagacagacagaaacaagtacgagtcaactgccagaagctggacccagaaatatgccatgggttaagtgacctgtggtatgtgtgaggaagagcctttctactccc

SEQ ID NO: 23942 - DNA, 267 bp, Glycine max
  Clone ID: 701101513H1
cttctttttactctctctctgtctctctctacgctttctcgttcgagatccctcaagggatccactaactgaaggagaaatggggttgacattcaccaagcttttcagccggcttttcgccaagcaggaaatgcgaattctgatggtgggtctcgatgcagctggtaagaccaccatcctgtacaagctcaaacttggagagatcgttaccacaattcccaccattgggttcaatgtggagactgtggaatacaagaacattagttt

SEQ ID NO: 23943 - DNA, 268 bp, Glycine max
  Clone ID: 701101514H1
cgttggtattgatattgatggttctttatgtggatgcacaattagaactacacatggtctaccttgtgcgtgtgaacttgctaagtatagtaggacgtggcacccaattcccttgcaagcaattcatgttcattggaggacattaaacttcagtgaccaagaaatgaacaatgaggggctcgagttagcgttgcaacgtgaagtggatgctttgcacaatcaatttcaggaacttgattatgctggaaaaattactttgaaggccaaa

SEQ ID NO: 23944 - DNA, 259 bp, Glycine max
  Clone ID: 701101515H1
ctcaacaacgctgagcgcagaaaggggaaaaggggattagggtttaggaagcagcgacaacaatggatttcacagtggagaagaaggaatcagagaacaacgccgaaaatgctcacccaacaacgctagattcttcttctcaattggcatcggcacttgattccaacaacaaagaaatccaagaacgacaagctcgtgaactcaaagccggacttcaccccctaaagcagcacaagtttgtctcctgttacactcgtcg

SEQ ID NO: 23945 - DNA, 268 bp, Glycine max
  Clone ID: 701101516H1
cggaaccatttatattggcggctcataggcaattaagtgctatgcatccaattttcaagttgttggacccccacatgaggtacaccttggagatcaataccttggctagacagagtttgatccatgctgatggaatcattgaaaattgcttcactcctggtcgctatgccatggagattagttctgctgcttacaagaacttgtggcgctttgacatggatagcctccctgcagatcttatccgcaggggaatggcagtagctgaccc

SEQ ID NO: 23946 - DNA, 267 bp, Glycine max
  Clone ID: 701101517H1
cctttctaccccatgatgtccacaagacgtcttattatggcttttgcaaacagcagctttggcctctctttcattacatgctacctatgttccctgatcatggtgatcggtttgaccgctcgttgtggcaggcttatgtttctgcaaacaaaatatttgcggacaaggttatggaaataatcaatcctgatgacgattttgtttgggttcaagactatcacttgatgggtcttgccgacatttctgaggaagcggtataaatcgggt

SEQ ID NO: 23947 - DNA, 251 bp, Glycine max
  Clone ID: 701101518H1
cgacattacgagcagaggagattccagaagaagagaaaaatcttggtcctcatgatcgtctaattcatgtgtaccatttcaataaagacgcggctcaaaaccaaatgcaaattcaaaactttggggaacctttttttcttgttatacatgaaggtgaaactctagacgaaattaaagtgcgaatacaaaagaaacttcaagttcctgatgatgaattttgcaaggggaatttgcatttctatcatggggcc

SEQ ID NO: 23948 - DNA, 273 bp, Glycine max
  Clone ID: 701101520H1
caattcctcttattcaggaatttggagagtattgatatatcaaggtaggataaaccagtagccaaggaagatatggagttttctatgattttcattgttagcaacattatgctgcttttcagttcagcatttgccaaaactgctagtcctccctctctgagcccaactccagcaccagccccggcaccagacttcgtgaacctcactgagttactcagtgttgctggtccgtttcacaccttccttggataccttgagtccactaaagtgatt

SEQ ID NO: 23949 - DNA, 269 bp, Glycine max
  Clone ID: 701101521H1
ccagcatatgcaatgatcacagatgctgaggaaaagaatctgataactcctggacagacaactttgatagagcctacatcaggcaatatgggtatcagcatggcatttatggccgccatgacgggatataagatggttttgaccatgccctcttacacaagcttggaaagaagggtgaccatgagagcgtttggagctgaattaatcctcactgatccagccaaaggaatgggaggaacagtaaagaaggcttatgaacttttggaaaa

SEQ ID NO: 23950 - DNA, 271 bp, Glycine max
  Clone ID: 701101523H1
cggctatccaacaatctctgttagacaggcctagaaaatctgtttccaaaactatctgcttaatcttttctatagctgctgtcatgatctcatcagcctttgttggttcttatctcatcaaatccacctccttcttcaaccaatcctctcctcaacatctctgtgatcatgcacttgatagggcaacatgtttaacccatgtctcagaagtggtacaaggtccgatcttgacccccacaaaagaccacaaattcaatttgttacagtcatt

SEQ ID NO: 23951 - DNA, 268 bp, Glycine max
  Clone ID: 701101526H1
ctcgagccgcgggtaacaaggacatcatcatggttgaccacatgaagaaaatgaagaacaacgccattgtttgcaacattggtcactttgacaatgagatcgacatgctggggctggagaactaccccggcgtgaagcgcatcaccatcaagccccaaaccgacagatgggtcttccccgagaccaatgtcggcatcattgtcttggccgagggtcgtttgatgaacttgggatgcgccacaggacaccctagttttgtgatgtcctg

SEQ ID NO: 23952 - DNA, 268 bp, Glycine max
  Clone ID: 701101528H1
cgtgaaagacgaatcaccattgatattgctttgtggaagtttgacacaacaaagtattattgcacagttactgatgcgcctggacatagggatttcattaagaatatgattactgggacatcccaagctgactgtgctgttcttatcattgattcgaccactggtggttttgaagctggtatttccaaggatggacagactcgtgaacatgctctgctttcattcacccttggtgtgaaacagatgatttgctgctgtaacacaatgg

SEQ ID NO: 23953 - DNA, 269 bp, Glycine max
  Clone ID: 701101530H1
cagcaaaataatggaggcttacactaaggttgtttgcattcttggacttttaatttttgtaagcatttcagatattcatagagtggagggtgcaggggaatgtgggaggtctactactccagataatgaagcaataaagcttattccttgtgtctctgccgcaaaagatgaaaatgttaaagttactaagaattgctgtgctcagatcgagaaacttggcaagaaccctagttgtctgtgtgctgttatgctctccaacacagcaaaaa

SEQ ID NO: 23954 - DNA, 222 bp, Glycine max
  Clone ID: 701101531H1
aatcagaatacggatccgggtatggaaggaaggaagaaggtgaatatgggtccgggtatggtgggagaaaggaggattctgaatatggatccgggtatggtagaaaacaagaagatgaatttgggtccgggtatggtggaaggaaggaggagtctgaatatggatctgcgtatggtgggagaaagcaagaatctcactatggatccgggtatggtgtaagga

SEQ ID NO: 23955 - DNA, 272 bp, Glycine max
  Clone ID: 701101532H1
ggctcttgaacctctcaggttttagaagctcagctaagcacaatagagagtttaattaggccattaacatatcatatgggtgtgactaagcctcatgtgcttatgctgttgatcatcatggttgtctcaattgcagagaaaccatcagtaatagaaggaagggctctttccttgatatctggtcaagggtactcaaagatttttgcaacgcttggatttgtatgcaagtgttgtgatggggttggaggtgcctgcactagtacatggacaga

SEQ ID NO: 23956 - DNA, 275 bp, Glycine max
  Clone ID: 701101503H1
ctcagaacctggtggagaagattctccgatcgaagatctaccagaacacgtactggaaggagcaatgtttcgggttaacggcggagacgttggtggacaaggccatggagctcgaccacctcggcggcacctacggcggcaaccgcaaacccacgccgttcatgtgcctcgtcatgaagatgctccagattcagcccgagaaagaaatcatcatcgagttcatcaagaacgaggattacaagtacgttaggattctcggtgctttttacttgcgt

SEQ ID NO: 23957 - DNA, 224 bp, Glycine max
  Clone ID: 701101467H1
ctcgagccgcctgcttctagtgctcttccttgtcatccaatttggtgtggtgtatgctattcatcatcatcatcatctaagatgcagagaaatttcatgaggctgctgatgttctttctgtgtttctcatatgttctctctgtctctgctattcctgcaacaagaacccaaaatttgaaaggtgaagaagatgatgatttttcagccctgccttctttaactag

SEQ ID NO: 23958 - DNA, 224 bp, Glycine max
  Clone ID: 701101468H1
cctcctttgactttgtggctggtgctgccttttctcgtgttgctagcggcggcaacaacgtctccaatacgcgccacgacggtcgcctcgtcgttccacggtcaacgagagtttgactatttcgctttcgcgttgcaatggcccggtacttactgcaaacgcacccgcagtttctgccccatcatcggttgctgcagaggctccaattttccaacagtgttcac

SEQ ID NO: 23959 - DNA, 223 bp, Glycine max
  Clone ID: 701101469H1
acagaaccgagcttgcagcagcgatttctcatttcatttttcacacttgcacaatggcgaaaaccttcaaatacatcatcctcggtggaggagtttccgctggttatgcggcgagggagtttgccaaacagggcgttaagccatgggagttggctatcatttcgaaagaagcggtagcaccttatgaacgtcctgctctgagcaaggcttacctttttccaga

SEQ ID NO: 23960 - DNA, 225 bp, Glycine max
  Clone ID: 701101470H1
gtgccgccattttgggcagagacccagcagggtatatttgatgcagtattgaagggacttatagattttgactcagatccttggcctctaatatctgacagtgcaaaagatctgattagaaagatgctgtgttctcggccttcagaacggttgactgctcatcaagtgttatgtcatccttggatatgtgaaaatggagttgcccctgacaggtcactggaccct

SEQ ID NO: 23961 - DNA, 223 bp, Glycine max
  Clone ID: 701101471H1
cggctcgagtgataatcaaacaagcgttttgatcaaagttttcgaaggggagcgagcgaagacagaggataacttccttcttgggaagtttgagctttctggtttcactccatcgccaaggggagttccacagatcaatgttgggtttgatgttgatgttgatggcattgtggaagtcactgctagagataggagcacggggctgaagaagaagatcacgatc

SEQ ID NO: 23962 - DNA, 226 bp, Glycine max
  Clone ID: 701101472H1
ctactaacccgacctcccgaacagcagcacaaatctccgcgaggcatctcagcccagaggtttggtcccacgacgctgaacgttcgcccttttccattccttcgtcgacactccggttccggcacgaagaaatcaccatgtcctccttcgagcaggtggtcgtcatcgacggcaagggccatctccttggccgtctggcctccatcgtggccaagcagctcctcaa

SEQ ID NO: 23963 - DNA, 228 bp, Glycine max
  Clone ID: 701101475H1
gtaatctttgtagtgcagcgctgcagcagtaataccaaccaaaatacactggacggttgtgtacatgttttaagattttgatttttcaattgaataatcaagcttgttttatcaaactcaaaaaaaaaaagaaaaaaaaagggggggccccggactagtgcgctcgtagcccggggatttaattcgggccgggtccggcaaggggtcccagtttccccaaaagggggc

SEQ ID NO: 23964 - DNA, 228 bp, Glycine max
  Clone ID: 701101476H1
cactaacaataatgaagccaccaagactgctgcagagaagaaattcaaaacactgccaccatcagagtctctgcctaagaatgaaaccattggaggctacatctttgtttgcaacaacgataccatggcagagaatctccaaagacagctctttggtctgcctccacggtacagagattcagttagaacaataactccagggttgcccctttttctgtacaactactc

SEQ ID NO: 23965 - DNA, 228 bp, Glycine max
  Clone ID: 701101477H1
caattcaaaccacgccttcccctgttcacaacctagcttgcccacaccaccatcacatcacaaaccattcctctcttgcatttaaacaaaaataaatatagattctgggggcatttcttggattctggttctcgttggtcacatccatcaaacacccctttgattctttcttggcgtgcgtcaggttcaattcatttttatggcaaccctgtcagagtaataagacag

SEQ ID NO: 23966 - DNA, 232 bp, Glycine max
  Clone ID: 701101478H1
aaaaatccgaaatttgtgctccaacacaaaaaaatgaaacctacaatcaccattctcttgttgtctctactacttctcataacttcaccctccttggcaacccgacccgcatccaaccctgatcaagtcaagcacaacaaaaacaacaaccaaggtggtggtgctggtgctggtgctggcgggttctttggccctggaggagggttcagcatacccggttttggaaacgggt

SEQ ID NO: 23967 - DNA, 233 bp, Glycine max
  Clone ID: 701101479H1
gggtggtgtgtgtttatggagttccattgctagtggtcaatggatttttggtgttgattacattcttgcagcatactcaccctgcattgccacattacacttcctctgagtgggactggttgagaggagctttagcaacagtggatagagattatggaatcctgaacaaggtcttccataatattacagacactcatgtagcacatcacttgttctccacaatgccacattat

SEQ ID NO: 23968 - DNA, 113 bp, Glycine max
  Clone ID: 701101481H1
cgagcttctgcaacaaggcacaaaagttatacacaacgtcaaaggaattatgggttaaagtgcaagttaatggagggcattcttgtagcggactgcatggagagtcgcagtgc

SEQ ID NO: 23969 - DNA, 172 bp, Glycine max
  Clone ID: 701101482H1
gctccacgatgcgaaatatatggatccattggaaatccaagtctcctggctattcgacccgtttgacgaagcgagagcattggatgccgccggagcaaaggagtatgtgcatattcgaattcagcagacgactcggaagaagagtctgaccacagtgcaagggctgaagaag

SEQ ID NO: 23970 - DNA, 225 bp, Glycine max
  Clone ID: 701101483H1
ctcttcctctcccagacaaacacatggctttgcccaatcagcaaaccgtcgattaccccagcttcaagctcgtcatcgtcggtgacggtggcacaggaaagacaaccttcgtgaaaaggcatctcactggtgaattcgagaagaaatatgaaccgaccattggtgtggaggttcatccgttggattttttcactaactgcggaaagattcgattctattgttggg

SEQ ID NO: 23971 - DNA, 223 bp, Glycine max
  Clone ID: 701101484H1
ttcacaagcaccttcaaggggaagttgcagaatcaccatgacgaggaaactatattcggcacgttttcgttgattttttggacccttactttgattccgttgcttaagtatgtattcatcctattgagtgctgatgacaacggggaaggtggaacattcgctctttattcgctgctctgtaggcatgccaagtttaatttgctccccaatcaacaagcagctg

SEQ ID NO: 23972 - DNA, 225 bp, Glycine max
  Clone ID: 701101485H1
caaaaaccattcaattcaaagatagtaggctgccaggcaccgcacaccgccaccgcactttctccgatcctcacaattttgcctccggcatgtctccggccgccggagtcagcgtccccctcctgggggattccaaaggaacgccgccgccggcttccgtccccggcgcggtgttcaacgtggccaccagcatagtcggcgccggaatcatgtcgattccggcga

SEQ ID NO: 23973 - DNA, 224 bp, Glycine max
  Clone ID: 701101486H1
cactcccaacccccacccgtagtttctaccaccttcagtcacggcgtaatacactaaccaacccaccatgtcgctgcctgcttgtcccgccgaacaactggcccaacttctcggcgcaaacaccacagacgcctccgccgccgcctcccttatctgaggccagttcgccgccgtggacagcaagttcgtcgacacggccttcgccgtcgacaacacctagctcc

SEQ ID NO: 23974 - DNA, 228 bp, Glycine max
  Clone ID: 701101487H1
cgactaactccaatctccctatccatgtatccctcttcctcttcctcctcctcctcttcctctcagtccatgacccaagctggcctcactcgctacggttccgcccccggttctcttctcaccagcacggttgattctcttattggtggatcccgtcccagtccctacttttccggagagtcttctgagtctccctgcaaagagcaaagatctttccacaaccacccc

SEQ ID NO: 23975 - DNA, 226 bp, Glycine max
  Clone ID: 701101488H1
cggctcgagtctgtggtgagcatggtggagaatggggttaagcccaatcaccctgactatggtgtcgcggaacttataaggacgaagcggcgtcgttttgactgggaagtgaggtttgtttctgtctccaacaaggcgaatcgtgtggctgataggctcgccaacgatgctcggaaattggcttgtgatgatgtttgtgaggagtatcttcatcccccggctaact

SEQ ID NO: 23976 - DNA, 229 bp, Glycine max
  Clone ID: 701101489H1
gcgagagtgaagaaatggcgcaagacttggcattggatttggaggagcttcgccgcctccacagcatcgccaaaagacctcgaaccctctctcttctctcctccgaaattcgtaacctcgaaaagttatcgtcagaggaagcttctgcgcagattccggcgccgatttcgaccggaactaaagtggcgccttcacctgcgctgaagtatgcggcactcgcgtcgttcag

SEQ ID NO: 23977 - DNA, 228 bp, Glycine max
  Clone ID: 701101490H1
aagcaagtgcttctaaatgactatgttaccggttttcccatagaatccgacatagtatattgtcgtaagtaccataacattgaagcttccacaaagttccaatgatatcttgctcaaaaatttgtacttatcttatgatccgtatatagagaatctcatgaacaagcccgaaggccctcccaatagtcgtgcttacactcctggctctccattaataggatatggtgt

SEQ ID NO: 23978 - DNA, 162 bp, Glycine max
  Clone ID: 701101491H1
cttatttattctccgaaaatggttgatttacattggaaatcaaagatgccaagttccgacatgccttccaaaactctaaaactctctctctccgacaacaagtccttaccctctttgcaactacccttccgcaccacagatatctctcacgccgcaccttct

SEQ ID NO: 23979 - DNA, 224 bp, Glycine max
  Clone ID: 701101492H1
atatgcccatctgtctaatcttatccaaaccacccctacttactagaaatcgccactcttgcattgtttcctccttgtactgttgttgtcatcattcttagttttatcagagggctaaaaggggttttcagtgggtctcagtataagtagtggtgctttgtacttgagtggtggtattattggcatgtgtctgttttttttttatctcctaggttatgggtggt

SEQ ID NO: 23980 - DNA, 229 bp, Glycine max
  Clone ID: 701101493H1
gagaattcctgaagtcagttaagaagtcagaatatgtgaacataaagaaccagtggccgagtatatcctcagcacaggctaaaagattcacaaaattcagggaaaggaaagggcttattgagaaagatgtggtgagaactgatagatcgctcgctttctatgaaggcgatgataatccagatgtaaatgttctgcgagatatcctgttgacatattcattctacaactt

SEQ ID NO: 23981 - DNA, 239 bp, Glycine max
  Clone ID: 701101465H1
ctcgaggagaagtgcagctgttgagcttctttgcgagtccccttggcaaaagggttgaatcggcattgaaactgaagggtgtggagtatgagtatatatgacaagatatcttcaacaagactagtctcctcctccagttgagcccggttcacaagacggttccggttctagttcatgcccacaaacccatcgctgaatcattcgtcatcgttggatacgtcgatgaaacatggcagcag

SEQ ID NO: 23982 - DNA, 230 bp, Glycine max
  Clone ID: 701101494H1
ctcgagccgggctgctgtggttgcttcggatttgtccaaaaaccaagacgacggcgtcgggataaacgtggcatcagtaatcttctctcccaggggctattattggatggagaaactgaaggcgatgagacatatagtggtgacgttactagtaactgcaccagtgtagatgacaatgaggtgcaagctgtacgcaaccgttcagaggatattttaaactttagagctaa

SEQ ID NO: 23983 - DNA, 232 bp, Glycine max
  Clone ID: 701101495H1
cgctcttgcaattattcctcttctcgcaatccgcactaaaattctagggttccgaaatggacgctgacggaaagatcaagaagggcgccggcggaagatagggcggcggcccaaagatgaagccggtttcaaggtccgtcaaagccggtctccaattccccgtcggaagaattggccgttatctgaagaaaggaaggtacgctcagcgtgtcggtaccggtgctcccgtata

SEQ ID NO: 23984 - DNA, 208 bp, Glycine max
  Clone ID: 701101501H1
ctcgattccgatccgagccggtccaaaaaaagcgacgaaccccgccgccgacgagtcctcctcctccctcatcaccgctgacgacaccgtcttccgctacctctgccccgtccgcaagatcggcagcgtcattggccgcggcggcgacatcgtcaagcagctccgcgccgagaccacagccaagattcgcatcggtgacgcgctaccc

SEQ ID NO: 23985 - DNA, 274 bp, Glycine max
  Clone ID: 701101502H1
caagcttggggtttgactcgaatcgaatcgaagcgattcatcgatcgatcgatggctcttgtaggagttgaactgaagcatgcggcggagggcgtaccggaggcgaattgccccgccaagcccaccaagcagggcgagggcctccgccactactattctctcaacatccacgagcatcagctccttcttcgccaaaagactcataacctcaaccgtctcgaggctcagagaaacgacctcaattctagggtgaggatgctgcgcgaagaattac

SEQ ID NO: 23986 - DNA, 231 bp, Glycine max
  Clone ID: 701101434H1
tttttgccctaaaaccctcgctgccgtcgtggtggccgcccaagaaaagagaatagagagcgcaaacgactcttcatcttcgactcaccatgaagctcgtcaggtttttaatgaagttgaacaatgaaaccgtgtcaattgagctcaagaatggcactattgttcatggcaccattacaggtgttgatatcagtatgaacacacatttgaaaacagttaaactaactctga

SEQ ID NO: 23987 - DNA, 229 bp, Glycine max
  Clone ID: 701101435H1
ccagtgtataaacctccagttgacaaaccaccggtttacaagcctccagtttataaaccacctgtttacaagcctccagtgtataaacccccaattgacaaaccacccgtttataagccaccagtttacaagccaccagtgtacaagcctccagtgtataagccaccagtgtacaagccaccagtgtacaagccaccagttgagaagccaccagtatacaaagcacccg

SEQ ID NO: 23988 - DNA, 226 bp, Glycine max
  Clone ID: 701101437H1
gggagaagcatgttgttgatgttgggactatgcttcctattgttctctgcatttccacttccgttctctgacagatgccacccacaagacaagaaagcgttgctccaactccagaaggacctcggcaacccttatcacatcatatcctggaacgcaaaggcggattgctgcgagtggttctgctgcgttaagtgtgacgagaaaacaaaccgcgtcattagcgttg

SEQ ID NO: 23989 - DNA, 224 bp, Glycine max
  Clone ID: 701101438H1
gcgttgtgttgcgtcgtgtcgtgcgctgttcctctgtctgtcgtttttgttttcagaccaaaccctagctccgcatcgcaaccatgtcgaccaagcacggtggataagctaagcctttgaagaaacccaagtctgataagaaggattacgacgaggttgacatggctaacattcagaagaccaaggaagaggagaaggcgctaaaggagttgaaagccaaggcg

SEQ ID NO: 23990 - DNA, 228 bp, Glycine max
  Clone ID: 701101439H1
cagcatttggaggcatctgtatcggtgctctgacagtgttggcagacttcatgggggccatcggttcaggaaccggaatattgcttgcagtaacaatcatctatcagtactttgagacatttgagaaggagagagctagtgagcttggcttcttcggtttctaagttctgccaagcaaataatgttggttggtgactccaacgagctctcccacaccccttgtttgag

SEQ ID NO: 23991 - DNA, 229 bp, Glycine max
  Clone ID: 701101440H1
gaaaaatgtgaagatgattttatagataatggcacaaccatagggacaacgactaggagaaagcagggccagaagaggagaagggtgcttctttctgattcagattatgcatcttctggatcatctgattttgagtttaccatatctgaagaagagagagaacaggtgagagaagccaagagattgtgtggaaatttgagaaataacttgaggagttcatcccatctaa

SEQ ID NO: 23992 - DNA, 234 bp, Glycine max
  Clone ID: 701101443H1
ctctttctctttccattgttctactttttcagtcccaccaccaatgcgcactccatgatctacccttcacacccatgaccaccctttccctcttcatcattctattttctctattttccaccccttcccattctcccctcacttgtgcttcccagaagctcaaccacacctacgccaactgcaccaacctccccaccctcggcgccaccctccacttcaccttcaacgccacca

SEQ ID NO: 23993 - DNA, 233 bp, Glycine max
  Clone ID: 701101444H1
caagaatccctccctttctggctttctctctctaaaactatcatgtcctccaccgcggctcccgtccttcccatatccaacccccaaaccaccgccgcaagccggcgcccatcgaggctccggcgaacaacccggccttccgcgccttcatcaacaacctctccgcgtccctcccgacacggcctcgaccagcgccgcccgtggtcggagctcggggaccgctccgcgttctc

SEQ ID NO: 23994 - DNA, 229 bp, Glycine max
  Clone ID: 701101445H1
aaagactttaccgagtccttacgcgttgtttgtgtttgcgtcggaaggaagagaagatgactgagaatttgatggagaaagtgagcgcactgggagagcgcctgaaaatcggaggcgtggaagtggggagaaagatgagcgaggggatgagctccatgagtttcaagctcaaggagttcttccagcctgggcccaatcaggccgacaagcttgtggaggacgctacttc

SEQ ID NO: 23995 - DNA, 233 bp, Glycine max
  Clone ID: 701101446H1
gtgatttggagtttggagcgactgaactaatcattaatttgcactcgctgtttcagcttcatcacccttcttttgcatcatttatatctcttgagaaatggcacaagaaacctttctattcacatctgaatctgtaaacgagggtcaccccgacaagctgtgcgaccagatctctgatgcagtacttgatgcgtgccttgaacaggaccctgacagccaggttgcctgtgaga

SEQ ID NO: 23996 - DNA, 237 bp, Glycine max
  Clone ID: 701101448H1
ggatagaaaaccctaaaggattcaagcttgactttttctttgataccaacccttattttaccaattctgtcttgacaaaaacatatcatatgattgatgaggatgaaccaatattggagaaagcaattgggactgaaattcaatggcacccaggaaaatgtctgacacagaagattcttaagaaaaaacctaagaagggttcgaagaatgctaaaccaattaccaaaactgaaaatt

SEQ ID NO: 23997 - DNA, 222 bp, Glycine max
  Clone ID: 701101449H1
cttctgcatcagggcactgaacttccacacatgagaaaagaccttgcatgttaaagtacaagttattctatggcatgttgtaacggtctaaatgacctgtgtacgtacataactgaggctggagtctatgctcaagatttgtgcaacattataagcttaatagatggccacgatagttatgctggcggatgttcttgagcacgtgtaaatcgacatcaatcg

SEQ ID NO: 23998 - DNA, 220 bp, Glycine max
  Clone ID: 701101450H1
tcgagcaatcccacacgcttcttactcctctcataacttttctgctccccgttgagaaagacttgcatccaaaggaaaaataacgctaatggctccaagagacagccgagccaccgcgctcattgggcccggcccaagcctatcaccggcccacaaagcgatccgctacagaggcgtcaggaaacgcccctggggccgctacgccgccgagatccgcgat

SEQ ID NO: 23999 - DNA, 229 bp, Glycine max
  Clone ID: 701101451H1
aaagaatcaaagacaggggtggtggctgcttcgaaagcttaataatttgttgatttccagaacatcatagttttcgcagcagcaaactaacaaattactcatatcatataataagatggcccgttctctctcgcaagccaaacgtattggtgtccttgttgctcaatctatctccctaattcccgttcatcggcgatgttacgcagtggcatccgatgtatcggtaaga

SEQ ID NO: 24000 - DNA, 224 bp, Glycine max
  Clone ID: 701101452H1
caaatattcagtgaagatcaacctcaatggcatctcttggcgtgcgaccagttcttccccctccattaacttccatctccgacccacctcctcttttcgatggcaccaccaggctgtacatcagttattcttgcccctatgcacaacgtgtgtggatcgctaggcactacacggggctacaagataatatcaatttggtccctattacccttcacgacaggcca

SEQ ID NO: 24001 - DNA, 228 bp, Glycine max
  Clone ID: 701101453H1
gaaaaaccaagtaatactagccaaaatatgtctcccaaatacatgtccctttccctcctagtaatactagggatggcttttctggccactacttcccttgctgatcgtcgttttctttcggtggaagatggtcatgatcaccatcaccaccacccaccaaaaaaacactggcctccaaccacacaaacatgaaccttcaaacgtagaaaacaaggagaacactgaggt

SEQ ID NO: 24002 - DNA, 224 bp, Glycine max
  Clone ID: 701101454H1
tcgagctttctctctctcattctcttctccatcgcgcgtaagaaacacattttagttgctactaatgggaactgttgaagctgcaaacaaggatgcaaatggaagtctcctagagaaaaatccttcagttgtttttgtgttaggtggcccaggaagtggaaagggtacccaatgtgcaaatattgtccaaaattttgggtatactcatctcagcgctggtgatc

SEQ ID NO: 24003 - DNA, 229 bp, Glycine max
  Clone ID: 701101455H1
gtgagaagtgagaagagaaaaatggcaatctccatacccagtagacaacttttcatagatggagagtggaaagtccctcttctcaataatcggtttccgatcatcaaccccgctactgaagacatcatagggcatatcccagccgctactaaggcagatgttgaccttgcggtggatgctgctaaaagagccttttcccataacaaaggcaaagattggtcttcagctc

SEQ ID NO: 24004 - DNA, 231 bp, Glycine max
  Clone ID: 701101456H1
cgctcgagccgctcgagccgctcgagccgctccaagatcacatttctctttgacccttttgctccctgtatctccaattcccctctccacccactttccctttaagtcaatttcatgcttctctgtctcagatcctagatcttgctgtcggtgggttgatcggagtagatgtcgccgtcaaacgcgttgcagaacggcggcggcggcggccgtaatggggtgagttatata

SEQ ID NO: 24005 - DNA, 227 bp, Glycine max
  Clone ID: 701101457H1
gctagctattagttcgattttgtagtaagtgaggtgccaatatggtgaagatagctcttggtactttggatgactcttttagcgctgcctctcttaaggcttatttcgcagagttccacgcaactctgattttcgtgttcgctggtgttggatcagccatcgcttacaacgagcttacaaaagatgcagccttggatccaacggggctggtggcagtagctgtggca

SEQ ID NO: 24006 - DNA, 230 bp, Glycine max
  Clone ID: 701101458H1
gcaaagtgcaaaaaccaaacctcgtcaaaggttttagtttgagtttgattcatcgtagtatctaagcatgactctctcccaatcttgccggaaaacaagccttcgaaaacggtgctatctggttgcaaagcagcagaagacgcgcttctacatcttcggacgctgcatagccatgctcctctgctggcacgaccacactgtttccgattagatccttcactcgcgtttca

SEQ ID NO: 24007 - DNA, 232 bp, Glycine max
  Clone ID: 701101459H1
caagaatccctccctttctggctttctctctctaaaactatcatgtcctccaccgcggctcccgtccttcccatatccaacccccaaaccaccgccgcacgcgaggcgccatcgaggctccggcgaacaacccggccttccgcgccttgctcaacaacctctccgcgtccctccgacacggcctcgaccagcgccgcccgtggtcggagctcggggaccgctccgcgttctc

SEQ ID NO: 24008 - DNA, 222 bp, Glycine max
  Clone ID: 701101460H1
ttcttctcttgcggctagggttttagcgcacttcttctagatttaaggaagatgggtaaggcaaaggttcacatcagtattgtggtcattggccatgtcgactctgggaaatccactaccactggtcacctgatttacaagcttggaggcattgacaagcgtgttattgagaggtttgagaaggaagctgctgagatgaacaagaggtctttcaagtatgcc

SEQ ID NO: 24009 - DNA, 228 bp, Glycine max
  Clone ID: 701101461H1
ggactttaggttgggatttgggaattagggttattcgcgtggcgaagatgattgaggtgctcttgaacgatcgattggggaagaaggtgcgcgtgaagtgcaacgaccgatgataccatcggcgacctgaagaagcttgtggcggctcagactggcacaagagccgacaagatccgcatccagaagtggtacaccatctacaaggatcacatcactctcaaggattac

SEQ ID NO: 24010 - DNA, 234 bp, Glycine max
  Clone ID: 701101462H1
gtccatggccactttcttcacccaaacctccttcccctcccactctctctccaaaaccttcgatacccatttcgccccatccccgaaagtcaacgtatttgcgaacttcccggcgaggaggcacgtgggggttcgagtttcgaacgcgctgatcgaaccagacggcgggaagctggtggagcttgtggtgagggataattcagaaagagacttgaagaagggtgaggctctttc

SEQ ID NO: 24011 - DNA, 236 bp, Glycine max
  Clone ID: 701101463H1
gcatgggcctcctcacactcttgagcgacggcaccgttttgcgttccaacatcaacttccaagaacaacctcaacccacccaacacgacaacctcgtacaattcaaagacttcctcttccacaaaaaattcaacctccacctccgtctctacaaacctaaatttgacgacaacattaatcatgatgacgacaagaacaacaacaataagtcgttgcccgtggtgatgttcctccac

SEQ ID NO: 24012 - DNA, 236 bp, Glycine max
  Clone ID: 701101433H1
gtttcattgaatcttcttcatcactgccaaaaacgtcaaaccaaaattttaaaacataaatctccaaccccattttctcacacacactctctttttctcttccaattacaacacaatccgtctgcgattcgccaccgaaaaacctctcaccatggtttctcgccatttggcttcgctcttcctctgtttcctctgtttcgagatctctgtttcatcaattcgattgcccggtttgg

SEQ ID NO: 24013 - DNA, 233 bp, Glycine max
  Clone ID: 701101464H1
tttctctctagagcttaatttctttctctatcaccccttgcttgcactttccatcatattttggatcatttaagtttttgacactaggcgaacattattgtattgaaaacactttcatttgatcttcttcttgttcatagtcttatgaccatagagatattttaataagaagatcggtttgtttctgatatagtttctagtgtttcatcaagtcacgtgcttcttattgtttt

SEQ ID NO: 24014 - DNA, 234 bp, Glycine max
  Clone ID: 701101401H1
aacgcaaccccctcttttagcgttcgaacaaaattagggttttctcaaccctagggtttaccttctcttcccctgttcgaaattaggcaaatcaaaacagaaacacgactacaaaaagaagaaaagaagaaaaagaatcaatcattcattgatcgctgaaacgatacgatgacagggaaggcgaacgcaagaagcacacggcgaaggagatcgcggcgaaagtggacgcggcga

SEQ ID NO: 24015 - DNA, 235 bp, Glycine max
  Clone ID: 701101402H1
ctcgagccgcaaagagacacaaagaaaattcttgcacaccaaagaaagattgcaacaactgcacgaaaatggcgacatttggaagaccaacgcatcgagaaacgcagtgcgttgtttgacgcagccttggcatccactagccgtaccccttcgctcccctctcatttctcctccgtccgctacctccgcaccggtcgcgatcccagctcaaggacttatgagataattccgccgg

SEQ ID NO: 24016 - DNA, 231 bp, Glycine max
  Clone ID: 701101403H1
aattaagttagtagcgagagcgggagaaatgaaggttgtttacttcttcgttgtgctattggctttggcatcctccattgcctttgcttatgatccaagccccctgcacgacttttgtgtggctatcaatgataccaaaactggtgtgttcgtgaatggaaaattttgcaaggatccaaagcttgctaaggctgaagatttcttctttcctggattgggacccggcaacac

SEQ ID NO: 24017 - DNA, 156 bp, Glycine max
  Clone ID: 701101404H1
ggaggctagaaagaaaaaaaaaaaagatgaatcagtgtggttatcagcagaagaatgctttgacaagctgtaaggagatgaggatggaatcagtggtgtgccctaaaccacgaagattgggcctgttgaaccactcaaccttttgatgaccacatc

SEQ ID NO: 24018 - DNA, 228 bp, Glycine max
  Clone ID: 701101406H1
ctcgagccgctcgagccgaatcggctcgagattgtcgaatccgtaaggcgaaggagagcaatcaaggagggctatcttaacaatgccaatggtgtgttgcatatgtctgccatgtggcttttcccacaactttgcttgggtggaatagctgaagcattcaatgcaataggccaaaatgagttctattacacagagtttcctaggaccatgtccagtgttgctgcttcc

SEQ ID NO: 24019 - DNA, 237 bp, Glycine max
  Clone ID: 701101409H1
cctcgagccgattcggctcgagaaacagaggaagagagaaagacccaagatgggcctttgcttacggttgcttcggcgtagacacacgcatgagcaaggacgaagagagattggcctctgaagaagcgcgtgccaaagctgctgaagccgcacagaaaaggcaagagcaatttgagaattctgcagcaggacgagctgctcgtgcacagcaacaagcaatggcaaagcaatctgcaa

SEQ ID NO: 24020 - DNA, 233 bp, Glycine max
  Clone ID: 701101410H1
ctcgagccgagaagatgagcttgttcgctgtgtttaccaataagcagagggaaccgcaaccacaggaggagtcactcgctgctgctaagaagctctcccccgatgtggcggtgttcgtgcagtacttgttcaagcaggggtatttcaacgacgccaatttcgctaaggggaggaagcactttaatcctgattggttctccaatgtcttcgccttaggctatatcaagtttgcc

SEQ ID NO: 24021 - DNA, 231 bp, Glycine max
  Clone ID: 701101411H1
cgagagggtggaacgacatgaggtgctcggcaagtggaggtcaagatttgcaatggccggtttcactccttaccctttaagttcattggtgaatggtaccatcaagaagttgctcgagcactacagtgatagatatagacttcacgagagagatggagctctttatctgggttggatgactagcgatttggttgcttcttgcgcttggaaatgaaagttctgcaataaggc

SEQ ID NO: 24022 - DNA, 232 bp, Glycine max
  Clone ID: 701101412H1
cgagagggtggaacgacatgaggtgctcggcaagtggaggtcaagatttgcaatggccggtttcactccttaccctttaagttcattggtgaatggtaccatcaagaagttgctcgagaactacagtgatagatatagacttcaagagagcgatggagctctttatctgggtacgatgaatagagatttggttgcttcttgcgcttggaaatgaaagttctgcaataaggca

SEQ ID NO: 24023 - DNA, 227 bp, Glycine max
  Clone ID: 701101413H1
gaatcaggccatacacagtcaggggaacgccccttctatgattatcttgagagttgccttcgccacaagtcagacatcgtgatttttgaagctgccagggcaataacagagctcaatggtgtaacaagccgagaattaactccagcgattactgttcttcagctattcttaagttcgactaagccagtcttgagatttgctgctgtccgcaccttgaacaaggtggc

SEQ ID NO: 24024 - DNA, 231 bp, Glycine max
  Clone ID: 701101414H1
ggtcttgagaatggtcctgcagccttggttggcctctatagtggtcgcaatgttggtaaacaagtggttgttgttgctcgtgactgaatgcagatgctttcgttggacattgctgtctttttttatgattttggtgttgaatattcagggctctttgtatgttttttgcaatcattttcaattgtggtatttgtgatagcagtgtaacttaagcaactcttagttgaaacg

SEQ ID NO: 24025 - DNA, 235 bp, Glycine max
  Clone ID: 701101415H1
acccaacacatcaatagtatagcatgtgttttacaaaaaatctccccatcaacctagcattaacaaaatctcctccacggttttgtttctgtcaagactacctcctctaaaaatacatgcacctagcttgtgttgtttgctttgatcccccaataagactatgttgctagaaatgagcttgtggattttctggtagcactgtcgtgcgttgcagccaggaataacaatcaaacca

SEQ ID NO: 24026 - DNA, 237 bp, Glycine max
  Clone ID: 701101416H1
gtggttttaacggcgaaggacgttgccgttgagggcttctgcatgagccgctgtggcacccacggctctacccggaacgttaaaagtaatgcccgaaccgcatatatctgggttggaaactccgaaacacagtgccccgggcaatgcgcgtggccattccaccaaccgatttacgggccccagacgccgccgttagtttctcctaacggcgacgccggggttgacggaatggttatt

SEQ ID NO: 24027 - DNA, 230 bp, Glycine max
  Clone ID: 701101419H1
gggagtcagagaaaccctaggtaagaagaaaagatgccggctggtcatggtttgagatcccgcaccagagattccttctctcgtcctttcaggaagaagggaaccatcgccctcaccacatacctgagaacctaccacgtcggcgactatgttgacgtcaaggttaacggtgccgttcacaagggaatgccccacaaattctaccatggccgcaccggacgcgtctggaa

SEQ ID NO: 24028 - DNA, 229 bp, Glycine max
  Clone ID: 701101420H1
gtgatttggagtttggagcgactgaactaatcattaatttgcactcgctgtttcagcttcatcacccttcttttgcatcatttatatctcttgagaaatggcacaagaaacctttctattcacatctgaatctgtaaacgagggtcaccccgacatgctgttcgaccagatctctgatgcagtacttgatgcgtgccttgaacaggaccctgacagcaaggttgcctgt

SEQ ID NO: 24029 - DNA, 231 bp, Glycine max
  Clone ID: 701101421H1
taatcactataaaaaaaaatctacactatctatccttccacaacacaacacaatccacataccacttaccaaactcactcatcaattctcatctttcttctcactaactattaattcatcatgtcgagcacagctggccaagtcatcaaatgcaaagctgcggtttcatgggaggcagggaagccacttgtgattgaagaagtagaggttgcgccaccacaagctggtgaa

SEQ ID NO: 24030 - DNA, 229 bp, Glycine max
  Clone ID: 701101422H1
cggctcgagaagatgaagagggtgttgccacgcaactggaagcaacaattcgtagtgatgatgggaacacacaacaggggaaggtgcagtttcctacggtttttatagggggtaagttgtttggaggattggataggatcatggctactcatatctctggggaattggttcctatcctcaaaaaagctggggctttatggctatgatgacttgatcttgataccccttt

SEQ ID NO: 24031 - DNA, 228 bp, Glycine max
  Clone ID: 701101423H1
ttcacagagagaatggctgcggaaaacgttgttgagttcacagacttacccgtcaagcggccaagagaagaagaagaaggaaccactggcgtctccaacgacgccgtttcagcgctccccaatgaccctcaataccctggcatctctgcggttattcccggttggttctccgaactcagcccaatgtggcccggggaggcacattccttgaagatggaaaagattttg

SEQ ID NO: 24032 - DNA, 230 bp, Glycine max
  Clone ID: 701101425H1
tttttctttttcaaatcaaaactgagaattcaatctataaataaaacgaaactcaacaacatttatgtcttatccgccaccatataacccccccagagtgtcgaaccatagtaacagtaaaagacaagaaaaggctccaacgtatgaagaacaacctaaatttacattttaaggcatagaagtcaaaataataacctttctaattcaggaaatccaactaccaaagtttt

SEQ ID NO: 24033 - DNA, 233 bp, Glycine max
  Clone ID: 701101427H1
ctcaccgatgaagaggtcgatgagatgattcgtgaggctgatgttgatggagatggccaaataaactacgaggagttcgttaaggtgatgatggccaagtgagtgatcatcacattatggccacaagaacctaaatgaagaagtgttgattaaaaggaaatgaccaaaaacacagaggtaaggggaaggacaagggtttgggctgtataacagtgatgtagtagtccttgtcc

SEQ ID NO: 24034 - DNA, 231 bp, Glycine max
  Clone ID: 701101428H1
ataaacgccgcccaaaaccatttatagggtgttcttttctttgccaagaaaatgagagcgtgcatttcaatccacattggtcaggccggtatccaggtcggaaacacctgctgggaactctattaccttgaacacggcattcagcccgatgggcagatgccgagtgacaagaccgttggaggaggagacgacgccttcaacacattcttcagcgagaccggcgccggaaag

SEQ ID NO: 24035 - DNA, 234 bp, Glycine max
  Clone ID: 701101430H1
gacatcgcgatctggaaccgagtttagctgaacgaaaaagaatcgagttgaaatgggtttctttggtaccattttggggtttttgggatttcgggttgggatttcgattggtctcgtggctggctactttctcttcatctacttccaacccaccaatgttgcggatcctgaactcaagccattggcggagcaagagccagagactctgccacgaatgtctcccgagattcctct

SEQ ID NO: 24036 - DNA, 237 bp, Glycine max
  Clone ID: 701101431H1
accaaatcatactttacatttgcgcatctcttatttaaccacacacctgtgagagtatataggaacatataccattactatggctctgaagttaggacatggcgtgatgatactagttattataagtgcttcaatgttttcagtgagcatggccaacaaggattggtcctttggtttcaactacactgattggtggtctagattcggaaatcatcctcagaacaaaacacagcaaca

SEQ ID NO: 24037 - DNA, 240 bp, Glycine max
  Clone ID: 701101432H1
gcgaaatcatttaagataagagtgcattactactaagaggagaaaaaatgaaagttgtatacttccttgttgctatcttggctttgacatccactgtggtctctgcctatgaccctagtcctctgcaagatttttgtgtggcggccaaagacaaagatggtgtatttgtgaatggaaaattctgcaaagatcccaagcttgtgacagctgaagatttcttcaaacatgtggaacctgcga

SEQ ID NO: 24038 - DNA, 266 bp, Glycine max
  Clone ID: 701101396H1
cacaaaccctcccctcacactctccaaaccctagcggcactacacacgttatctctctctctctctctctctctccctctctccttccccaagatgtcgagcgccgatcccgagcaccgagaagaggaggaggcacccgccgtcggcgacgacgaggacaccggagcacacgtcgctcccatcgtcaagctcgaggaggttgctgtcaccaacggcgaggaggacgaagatgcaatcctagatctcaaatcgaagctttaccggtt

SEQ ID NO: 24039 - DNA, 256 bp, Glycine max
  Clone ID: 701101369H1
gtcctattgggaaggagtgtgctgatttgtggcccaggattgcaagtgctgcaaatgctattgtttaagctgggtttttagtttatgtaatgtttctgcttcttgaagttgtttcagatattgttttaggttgaattgcagacaatattggcatttggcacatatagtttgtttttgcttgacttctcagtgagaagtgttttgatgagattaattgatagttaaaaaaaaaaaaaaaaaaaaaaaaaaaaaaaga

SEQ ID NO: 24040 - DNA, 254 bp, Glycine max
  Clone ID: 701101370H1
gcaagcattactactcttatatgggcaacaagtttgatattgaataatcctagtgtactagaaaaacttaaagcagaactagacatccaagttggaaaagagagatacatatgtgagtctgatttaagtaagttaacatatcttcaagctgtagtcaaagaaactttaagattgtaccctccagctcctctctcaagacctcgtgagtttgaagaggattgcactataggtggctacactgtcaaaaagggaac

SEQ ID NO: 24041 - DNA, 251 bp, Glycine max
  Clone ID: 701101371H1
aaaaatgtcctggctcttcaagtccaaccaccctgacccagaatcttctactctccacaaccgcaccgttatccactcgtcttcgccgccgcatcccgccgccgatcgccacggcgtcaaggacgacatatcgcatattttccgcggcgtcgccaacttcctcgctccgccgccgccgtcttcttcttcttcttcttcttcttcttcttcctcctccgccggcgattcctcctcctcgcaagctctgtcag

SEQ ID NO: 24042 - DNA, 251 bp, Glycine max
  Clone ID: 701101372H1
cttggaattgcgccccatgctgacaattctgggatcactcttctgcttgactgtgctgattttccagggttgcagttcctcaaagataaaaaatgggtcaatgttgaacctatagaaggggcaattgttgtaaacattggccaaattattgaggtgatgagcaatgggatatacaaagcgccagagcatagagctgtagtaaataagttaaaggagaggttttcaatagtgacattctgctatccaagccc

SEQ ID NO: 24043 - DNA, 253 bp, Glycine max
  Clone ID: 701101374H1
cgtagcacattgtataaaattggtctggcagatgaaagtatggtcaggtcagcctcattcttaatattggagcagaaattttttgagcttctaaatggtgaaaaggtcatggaagcgttgaagaccttgaggacagagattgctccactttgcattaatagtagtagaattcgagaactttcttcctgcttagtttcagcatcttctaggctagacattctaagggtgaggtctcgatcaaagcttctggagg

SEQ ID NO: 24044 - DNA, 255 bp, Glycine max
  Clone ID: 701101375H1
acaaagcattgaattcaaaaactaagttcatttcttgtgctttgctttattcctcaaaaccaaacatgtcgaacacatgcggcaactgtgactgcgctgacaagactaactgcaccaagggaaacagctatggtgttatagtagagactgagaagagctacatcgagactgttgacatggatgttccagcagctgagcatgatgggaagtgcaagtgtggcactaactgcacttgcacggactgcacttgtggcc

SEQ ID NO: 24045 - DNA, 257 bp, Glycine max
  Clone ID: 701101376H1
ctcgagccgctcgagccgcttcgatttcatcgtgttgatgatagggtcgctctttctgttcaaagctttcgattttactttctgtgtctccttcttctgcttcttttgattcccccaaatcttcagttttaaaaaccctaatctgctgccatgaggaagaagctcgatacccgtttccctgctgctcggataaagaagataatgcaggcagatgaggatgttggaaagatagcactggctgtgcctgttttagtttc

SEQ ID NO: 24046 - DNA, 239 bp, Glycine max
  Clone ID: 701101377H1
ctcgagccgcttttgtgccgaaccatggatcctccaaggaagaagaagaacaggacgatacggcgtcgcagagctgagaaccctagggaaacagacttctctcttccggctcgcacatcaataccctccctctcctactcaccgccgtttccccctcttcccctcctcaccacgttctcgaatccctcctctcgctaccactccttactcatcccactcctccccaagcttccttcctc

SEQ ID NO: 24047 - DNA, 256 bp, Glycine max
  Clone ID: 701101378H1
cgcttctcgatgtacatgagaagcaaatgcttgtgcggatgctttggccaatttgtcttatggcttgcagttgggttttatgatgcatgagcaacctcctgctatcagtcaactgttgcttgctgacagtagaggagttgtttctcctcgcattatttctttgtagtttcctttgggcttttgctctgtttaataccaaaacaaaaaaagctttgctgcttttattctagtggtgcattgtgtagatcaattgata

SEQ ID NO: 24048 - DNA, 261 bp, Glycine max
  Clone ID: 701101380H1
gtggacttcagggagtaacagatgcagggtttcttccactgctggagagctctgaggctggtctggttaaagttaatctaagtggttgtgtaaatctgacggacagagtagttttatccatggtgaactcacatggatggactctcgaggtgctaagccttgatggttgtaaaagagtcagtgatgctagcttgatggctattgcaggtagttgcccagtgctcgatgatctcgatgtatccaggtgtgcaatcactgata

SEQ ID NO: 24049 - DNA, 260 bp, Glycine max
  Clone ID: 701101382H1
ttcaggcttagatcgcttaccacaccataccatatggctgttactgtggccatgttacctcgttggtcggtgtttcttctttttctgtttgtcttgtgtagctcaggagcaaaggttgtcgccattgatgtacatgcagcaaagcgtctcatccagaccggttccatttatcttgatgttaggacggtggaagagttcaagaaagggcatgtggatgcagttaatgtccttaacattccatacatgttgaatacacccaa

SEQ ID NO: 24050 - DNA, 259 bp, Glycine max
  Clone ID: 701101383H1
tctctttctcttccttctcatcattctcatattattgtcgccacttcgacctcaatcaccctcgcgccctcgctcttcccttcctggtggcgacaatgtcgactcctgctaggaagaggctgatgagagacttcaagaggctgcaacaagacccgcctgcagggatcagcggtgccccccaggataacaacataatgctgtggaatgctgtcatatttggtcctgatgatactccatgggatggaggcacgttcaagtt

SEQ ID NO: 24051 - DNA, 255 bp, Glycine max
  Clone ID: 701101384H1
ttttgaggttccaatacaaatggacatatctgctcaaaaaatgatatttggtgtgcctgggattgatcctcaaagaagagccgagctaatcaaggtattagatatcgatctttcctggagattgcataaagtatctgatggtcaaagaagaagggtgcagatttgtatgggtctcctcaaaccattcaaggttcttcttctcgatgagacaacagttgaccttgatgttctagcaagagctgaccttctgagatt

SEQ ID NO: 24052 - DNA, 235 bp, Glycine max
  Clone ID: 701101385H1
tgctgttccccaactccatggtaatagaagggtattgccattgagagcatctgccatagtgtaaagtatatgtagaccagtgtcgttgataaacacggtgcacaattgattgctgtcgctattcgtgctgatgcaagaacatgggactcacatcgtattgcatccctaaatcgtaccactgctaaaggtgttgtgcaacatgatataccgtcctttgttcagttaattcgtttaa

SEQ ID NO: 24053 - DNA, 255 bp, Glycine max
  Clone ID: 701101386H1
ctccgagccagcgagcgagaatcagactcaagaagaaaacgtgttatgttactcttaccccttgctctttttctctctttcttgaatttggcgcgtgcgtttcgattcttcttccgaatcagagggattctggatttcttgttgaagatgcgacgctcttctgcatccaaaaagtcgggttaatccaattccactcccaacgccggcgatctcttccgctctgatgtcaagtaaggcaagctcgaaggaatcaga

SEQ ID NO: 24054 - DNA, 254 bp, Glycine max
  Clone ID: 701101387H1
actcgagccgattcggctcgagtatacttgttccttttgaaggttagcagtgctacaatacaaacaatggcagctactcaggacgatgtgaagcttttgggtattgtgggaagcccatttgtgtgcagggtccagattgcccttaagttgaagggagttgaatacaaatttttggaagaaaatttgggcaacaagagtgatttgcttctcaaatacaaccctgttcacaagaaggttccagtgtttgttcacaa

SEQ ID NO: 24055 - DNA, 255 bp, Glycine max
  Clone ID: 701101388H1
ctctgtctctctctctcggtctcgctcttcttctcatcaagcacagagttacagactcaccgatcttccgattctctttcgtcttggtttatgagctcgaaggagagacccactcttggtggcacgcggattaagacccgcaaacgaaatattgctgcgccgctggaccctgcagcattctcggatgcagtggtccagatttatttggataatgctggtgatctggaacttattgccaagagtattgaatcttca

SEQ ID NO: 24056 - DNA, 255 bp, Glycine max
  Clone ID: 701101389H1
cgtattttcatgtccttcgcctgcagatagcgcagacccaagttacttctagaacctccgtgttccgcgaattacaccccaccctcaaacaaaccacttgcacatattctgagagaaagagtattgaatcctcatcctcttccttccattcctcaagaaccctaatcccaatcagccatgcagcaaggagactacacctccgctccatctccatattatcaattccctcatctccaaaaccccaatcccaatccc

SEQ ID NO: 24057 - DNA, 254 bp, Glycine max
  Clone ID: 701101390H1
cttgcaactgcttggcatgccatcttgaccgggaccatcttcactgtttattacaaacctaggaccagtcccgccgaatttattgttccgtatgatcaatatatggagtctttaaaaaatagttatagcatcgggatgcggttcaaaatgaggtttgaaggtgaagaggctccagagcagaggtttactggtaccgttgttggaatagaagatttcgatcccaaaaggtggagagattccaaatggagatgcct

SEQ ID NO: 24058 - DNA, 225 bp, Glycine max
  Clone ID: 701101391H1
ctagctactagcatcttcttgcatcagcacattcatgttaatgaggattctctaggggtggtttccaatcaatatcccgtaattttgtctccagtgctttccggttcaatcaccaatgcatgagtgaatttgttaatttcgtaatccaataacagcatgatgacacatgacacatcctccgtttccggcgggggaatcgtgtgtgtgaacggtgccggcgggttc

SEQ ID NO: 24059 - DNA, 255 bp, Glycine max
  Clone ID: 701101392H1
gtttgttccatctcttgcttcttgcttctattacttgcttctttcttcaccatgtcacttgctgggaaaatcaccactgaaattggggttcatgcaaccgctgcaaagtggttcaacctctttgcaacacaacttcatcatgttcaaaaccttactgatagagtacatggaaccaagctgcatcaaggtgaagactggcatcacaacgagacagtcaaacactggacttataccatagatggtaaggctacaaca

SEQ ID NO: 24060 - DNA, 260 bp, Glycine max
  Clone ID: 701101393H1
gcaagccccactcaagcaccacacctctcctcgttcacgctacccctttctgctcttcttctacctttcaagttttaaaagtataaagatggcagagacattcctatttacctcagagtcggtgaacgagggacaccctgacaagctctgcgaccaaatctccgatgctgtcctcgaaaaccaactcgagcaggacccagacagcaaagttgcctgcgagacatgcaccaaaaccaacttggtcatggtcttcggagaaa

SEQ ID NO: 24061 - DNA, 258 bp, Glycine max
  Clone ID: 701101394H1
gtggtgctggtccagatagctaatcctgcgagggggcgagggaaagatgtgaaagaagtgcaagccgagacgaaggccacggtgaaacgaattaatgaaacatttgggaaacccgggtatgatcccgtcattctgatcgaggagcctctcaagttttatgagagagttgcttactatgttgtcgcggagtgttgtttagtcactgcagtaagggatggaatgaatctcataccgtatgaatatatcatcagtcgtcaa

SEQ ID NO: 24062 - DNA, 262 bp, Glycine max
  Clone ID: 701101395H1
ctcgagccgctctgctctctctctctgtctcctacgattcgttttgccccttttgttgccctcatttcaaccatgcctcgccgtagctccggtggaagatctgcccgtcctgctcctcgggcagctcctcgtcctgctccagttcaccatgctcctcctccagcccctgctcagagtggtggtggatctatgcttggtggcattggttcaaccatagctcaaggtatggcttttggcaccggaagtgcagtggcacacaggg

SEQ ID NO: 24063 - DNA, 256 bp, Glycine max
  Clone ID: 701101368H1
atgtggtccaagatggagacattatattctttaagttcaacgtttctggtgggggcaagaagtaaatccagcgattcatctcaaatagcagagctggttttgcatggagtttgttttattataggtgcctaccatattgcacaatttgtagaagtttgaaaatgtaatttttggaccattttcaatattatttacttatttaggcttattaatatctctagtggattttgacctctcacctatttccatgatttat

SEQ ID NO: 24064 - DNA, 261 bp, Glycine max
  Clone ID: 701101337H1
ctcgtaacgaggagaaggcccagtcgatgctcaaccgcttcatcaccatgaaggcggcggagaagaagaagccgaaggagcgccgccccttcctcgcctcagagtgccgcgacctctcggaggccgacaagtggcggctacagatgctgcgggagatcggccggaaagttgccgagatccagaacgagggtctcggcgaacaccgcctccgcgatctcaacgacgagatcaacaagctcatccgcgaaaactcccactggg

SEQ ID NO: 24065 - DNA, 258 bp, Glycine max
  Clone ID: 701101338H1
cagaaattgttgtccctgactggcgtgggcgtctgtgtatgaatgtgtttgtgagaaaatggaagctgcgatgggcatgatgcggaggattcctccgaaacacacagaaacagctctgtcagcgcttctgagacttatgcctgacaactcctccgatctcctctctcaagtcgatcagcccctccaggttctgtgcgatgtggaatgcggcaaggagttcattttgtgcgaatacaatagagatgccgactcttacag

SEQ ID NO: 24066 - DNA, 254 bp, Glycine max
  Clone ID: 701101340H1
acttcacccattcatacgtggtgttgttactgctgctcttttctcttttcttttctctttagttctctcttcccctttctttttctttttcttcttcttctgagcttgtttaagcttttcttccattaacatattatcagaatgtgtggtattcttgctgttcttggttgttctgatgactctcgagccaaaagggtccgcgtgcttgagctctctcgcagattgaagcaccgtggccctgactggagtgggct

SEQ ID NO: 24067 - DNA, 255 bp, Glycine max
  Clone ID: 701101341H1
tgagaaataaggggaaaaaatggtgtcgctgaaactgcagaagcggctggccgcaagcgtgctcaagtgtggcagaggaaaggtgtggcttgaccgcaatgaagtcaacgaaatctccatggccaattctcggcaaaacatcaggaagttggttaaggatgggtttatcatcaggaagccaaccaagattcactcacgctcgcgtgctcgtaggatgaaggaggcaaagaagcagggccggcactctggttatgg

SEQ ID NO: 24068 - DNA, 255 bp, Glycine max
  Clone ID: 701101342H1
ctctatattgattccataaggggttactcttcttccttttgttaccaaaaaaaaaggccatgattttctcactgatggtgaaagcactagctggctgatgtgtgattgattgtgcctgcctcagttctgtgtgagagtttcagcaagtggctcagctgatgaggagaggactattataaggaaagagaaagttgggtggaagatcaattactcaggagagaaaccagcaacaccattattggacacagtcaacca

SEQ ID NO: 24069 - DNA, 252 bp, Glycine max
  Clone ID: 701101343H1
attattttctgcgtcaattttgctgaaaaccttaagtgggtatcctgaaaacactagattttcgattcgtttggtaagcggatttttaggtttgattattacgtttttctgttcttgttggatatggaggtttcggtgattggaagctctcaagcgaatctgggagcgtcggaattggcatctagggacgttggattttgcaatcttaagaacaatttaagggctttgaatgatagagttagttttggtagg

SEQ ID NO: 24070 - DNA, 259 bp, Glycine max
  Clone ID: 701101345H1
ctcgagccggttttgcttttgccacttcgaaaccaaattttcttcgttcgtccttctgtgaactcttcttccaccatgagcaggtcagggcaaccaccggatttgaagaagtacatggataagaagcttcagatcaagctgaacgcaaatcgcatggttgttggtactctccgtggctttgaccagtttatgaatttagttgttgacaacactgtggaagtgaatggcaatgagaaaactgacatagggatggtggtaa

SEQ ID NO: 24071 - DNA, 254 bp, Glycine max
  Clone ID: 701101346H1
tttagaaagaggagagagaaagagaaagagaactcgttcttctttttccattaacattttcaatttttttcacctaacacatcatctcctttccattcctttcttccttcgtcccattctcgaattggcgtgtgcctcttgcaatccctcacaggttttttgaagcagtagaatggacttctttactagagtcatacatgaggattctatgcttagatgctcatactttaggaacatcattgggcctactaact

SEQ ID NO: 24072 - DNA, 258 bp, Glycine max
  Clone ID: 701101347H1
ccaggtccagacatagtaaggattgacagactgagagctctttcttgattctatgggtggtggtgcatggccgttcttagttggtggagcgatttgtctggttaattccgttaacgaacgagacctcagcctgctaaatagctatgtggaggtaaccctccacggccagcttcttagagggactatggccgcttaggccacggaagtttgatgcaataacaggtctgtgatgcccttagatgttctgggccgcacgcg

SEQ ID NO: 24073 - DNA, 262 bp, Glycine max
  Clone ID: 701101348H1
gagttaccacaacttcaattgtggttgcatccgctgtaatatcaaaggatcgtgacgaaaccacaactgcaacaaccgcaatttaaaacctttgtgtgagaataatgcgtactacagcagaatttcaaggctctgttctgaatcttcgtggggttcaggttcactccatggagggttcaagcatggagcaagagcttgatttgtttcagaagcatgtgacagagcgattcctggagctatctttggctgaacatggtgaatt

SEQ ID NO: 24074 - DNA, 264 bp, Glycine max
  Clone ID: 701101349H1
gaaaaaaaaagaacatagttatttatttttggttcatggccgttcaagctcaatatccatccaatgtcctttatctaaacagcagaaacgatatagaagagcatgagtattcttcattgcaaccacaaccaggaggagttgtactcttgaatcagcctcacatgttatacaacatcaatgacaatggaagtaacaataacaacaacaataccaattctcggaagagaggtagagaagacccgggtgttggcaacaacacaatca

SEQ ID NO: 24075 - DNA, 265 bp, Glycine max
  Clone ID: 701101350H1
gtggcggtggccatgatccatttgatatcttcagttcattctttggtggaagtccgtttgggtcaggtggtagcagtagaggacggaggcagaggcggggagaagatgtggttcatcccctgaaggtctctctggaggatctttacctcggaacttcaaagaaactctctctttcacgaaacgtgttgtgctcaaaatgcaatgggaagggctcacagtctggggcttcaatgacctgtgctggttgccagggtactggcatgaa

SEQ ID NO: 24076 - DNA, 255 bp, Glycine max
  Clone ID: 701101353H1
gtgattgttgaatacattgatgagacattgaagaacaaccccatcttaccttctgatccttaccaaagagccttggctcgtttctggtccaaattcattgatgataagattgtgggtgctgtatcgaaatctgttttcacggttgatgagaaagagcgtgagaagaatgttgaagaaacatatgaggctcttcagtttcttgagaatgagctgaaggacaagaagttttttggaggagaggaatttgggttggta

SEQ ID NO: 24077 - DNA, 256 bp, Glycine max
  Clone ID: 701101354H1
cccaaacaaaaacaacacatcacggagcccccaaccatggcttccaagctctgcgactcatgcaaatccgccactgctaccttgtactgccgccctcacgccgcgttcctctgcggcgcctgcgattctaaggtccacgccgccaacaagctcgcgtcgcgccatccgcgcgtggcgctctgccaagtgtgcgagcaggccccggcgcacgtaacctgcacagctgatgccgccgcgctctgccttgcctgcgacc

SEQ ID NO: 24078 - DNA, 251 bp, Glycine max
  Clone ID: 701101355H1
catatcgcgtatctttctctgttctattcctacgacggattttggggtgccgaggttaaggttggtgagtctgttaaggtagatccagccgaattcgaggcatgcatacagctttctcatgctgctcttggtgaggcaaagaaagacatatcagatgaaccatttgttctctacttgaaagttggtcaacagaaatgtgtcttgggaatcctttccagggctataattcctcaagtacctctggaattggt

SEQ ID NO: 24079 - DNA, 252 bp, Glycine max
  Clone ID: 701101356H1
atccagttgacattagtattcgtgttcaaaggcgcagttcaaaaatccttctacaattcggtgatcatggctgaggtcaaggttctgcaacactgcttttgtcgcagtgggcagcctatgcctttagaggaactttatgtctgccgtgaatgcgatacttttgttgctccttttgtgtaaatcaagagatcgaatcgtacttctgcacgaactgtctggaaaatgttcttcagtctgaggcagcactattat

SEQ ID NO: 24080 - DNA, 255 bp, Glycine max
  Clone ID: 701101357H1
aaagccatagtttgtcacttctcttcgccttttgctttgcaattgtcaccaaacaattcttgcttagctctcacaagcaagcattatcaacaatgaagaaaattgtgttaaaggtggacttacatgatgacaggatcaagcgaaaagctatgaagacagcatctggcctttcgggtaaatcaaaattttcaaccctactacaactttgctttgtttcaagaagccaaatagccagtcagctgcagcatcaaggaa

SEQ ID NO: 24081 - DNA, 256 bp, Glycine max
  Clone ID: 701101358H1
ttcccctgttgatgagactgttttcgatgtggataacgatgttgatgaccttctgccagttgaagttaaagaacagcgcctcagcaatctgctgcaggcattgatggttgccgcttgtgttgctgctatgcctcttttgaagaagataccaacttcagtgctttggggttactttgcttttatggcaattgacagcttgcccggaaatcagttttgcgagagactattatatcttttcactgctccaagtcgaaga

SEQ ID NO: 24082 - DNA, 231 bp, Glycine max
  Clone ID: 701101360H1
tcgagccgctcgagccgatctttctctcttctctctccccgcccaaaccctaactccctaacctattccaccttctctcatccaacacgaaaggaggaaagtccacgaccgaatctaagagagccgatgccaaacttgctgtgaatcagaagggcgccgccaccaagactaggaaacccgccggacaggggaaagcagcgaaagatcctaacaagccaaagaggcctccaa

SEQ ID NO: 24083 - DNA, 259 bp, Glycine max
  Clone ID: 701101362H1
atttttggcagaaaatttgggcaacaagagtgatttgcttctcaaatacaaccctgttcacaagaaggttccagtgtttgttcacaatgagcagcccatagcagagtctcttgtgattgttgaatacattgatgagacatggaagaacaaccccatcttaccttctgatccttaccaaagagccttggctcgtttctggtccaaattcattgatgataagattgtgggtgctgtatcgaaatctgttttcacggtggat

SEQ ID NO: 24084 - DNA, 264 bp, Glycine max
  Clone ID: 701101363H1
cgggcgtggagagcgatgaggacatagaagatgttacggaggagcaagagaaggtagaagaagaagaagaagatgatgaaataattgaatctgatgttgagctcgagggtgaaacctgtcagtctgatgatgatcctccacagaagatgggagacccctctgtcgaggtcactgaagagaatcgcgacgcttcgcagatggccaaaattaaagccatggatgctatttctgaaggtaagttggaggaggcgattgagaacttaa

SEQ ID NO: 24085 - DNA, 262 bp, Glycine max
  Clone ID: 701101364H1
cagaaatgttgctgttttccaagcaaatccgcttatgaatgggctttcaccttctgactatgttctaagtgcattttcagatgttcactccaatgatttggagcaaacattattggctttaccattttcagatgctttgaagcttctgtcgtacttgaaagactggacttcatactctgataaggttgagcttgtttgcagaataggcacgctgctgttgcagacacattacaaccagcttcttgccacgccagctgcccga

SEQ ID NO: 24086 - DNA, 267 bp, Glycine max
  Clone ID: 701101365H1
cgagaatgggaagaaagaccgggtatgttgagttcgaggagtcgccgccggacgattttgatccggcgtctccgtacaaggacccggtgcgcgatgctggagatgagggagcacatcgtgagagagaagtggatccaaatcgagaaggccaagatcattacggagaagctccgctggtgctaccgcatcgaaggcgtcaaccacctccagaagtgccgccacctcgtcaaccagtatctcgagtccactcgcggcatcggttggggc

SEQ ID NO: 24087 - DNA, 87 bp, Glycine max
  Clone ID: 701101366H1
tcgttatcatcttcttcttcctctaacttagatctcttctttctctacgccgtacgccgaaaccatggccggacaatgcgatggtcc

SEQ ID NO: 24088 - DNA, 262 bp, Glycine max
  Clone ID: 701101336H1
gaacaactacttcttcaaacaacaacagattcaagttcatagttttttttggtaaaacagaaatggcctaccactcttctcaaaattcccaacctgctctccctatgcacctatgtttcttcttgctcaccttgttcatgttccttagtttctcattttactcaagctacgagccaataatggagagtttcatggaccaagtgaagttggttctaatggtttctccccttctgcttctgctagttgtgcacttcctttgcaa

SEQ ID NO: 24089 - DNA, 254 bp, Glycine max
  Clone ID: 701101304H1
gctttttaattaattgggtactaggaaaaatatgcctgagatggtggatagtaatagcacaccctctagttccacaggttcaagaactgtccttctccttttgagggtcttaacctttgtgttccttctcattgcactcattctcattgcgatagtccagctaactgatgatgagataggcgtggaaatcaagttcaatgatatctatgcttatcgatatatgatctctacaataataattgggtttgcgtata

SEQ ID NO: 24090 - DNA, 133 bp, Glycine max
  Clone ID: 701101305H1
attggaggctcttgggctatggcaattgattcctgcaaatggaggaatgctcactgccctataccaactccactctcgcgatgtgtccagattcgtgctaagggtaccaagcttgagagtagtggtgaatggt

SEQ ID NO: 24091 - DNA, 77 bp, Glycine max
  Clone ID: 701101306H1
ttctatatggtgctcttactctattctgggctgcaacttacttagcttgaagtgcgatgctcagaacatgggtatgg

SEQ ID NO: 24092 - DNA, 258 bp, Glycine max
  Clone ID: 701101307H1
cgagtaccagagcaactttattcaattggtgtgcatggtggagctatcgatctctctggaaacaaaggtttgtgtggtgtaccatctctgccagattgtcctatgttttgggagaatggaaaactatctactcagggtaaaattgcaataggcttgtcctgtctctttgttttctgtgtgatactgctgctggtctatatttacattaggagaagaaggaatgactatgactttgctctacctcatgaattaacatca

SEQ ID NO: 24093 - DNA, 242 bp, Glycine max
  Clone ID: 701101308H1
cttcaattcagtaaaccgcaccaattccgatggcggcgtcgcggcggctccgggacctccaatcccaaccggcgaacaagatctgcgtcgactgttcccagaagaacccgcaatgggcctcggtttcctacggcgtcttcatgtgcctggagtgctccggcaagcaccgcggcctcggcgtgcacatctccttcgtgcgatccgtgacgatcgattcgtggtctgaactccagatcaagaag

SEQ ID NO: 24094 - DNA, 80 bp, Glycine max
  Clone ID: 701101310H1
tcttttgttcactaccttgaggttctagaaggtgctgatggggacaaaatgccaggctggccagcattccacacaacaga

SEQ ID NO: 24095 - DNA, 258 bp, Glycine max
  Clone ID: 701101311H1
caatttgataaacctaggggtttgatggaggggagatatagtggggattgatatgatgaaggtgtttataaggttgttctgttgaaattgtgtttttgggatggcaatattgtacgaaccagcaataaaactcatcgaccagatgagctagcatgggcgattcttgtcttacttctttgtcaatggagaatcatcacccttccacgctcttgtcaatatcctcaagtgcatcttctcacgaggaactggatttggaga

SEQ ID NO: 24096 - DNA, 260 bp, Glycine max
  Clone ID: 701101312H1
gaattcctcttattcaggaatttggagagtattgatatatcaaggtaggataaaccagtagccaaggaagatatggagttttctatgattttcattgttagcaacattatgctgcttttcagttcagcatttgccaaaactgctagtcctccctctctgagcccaactccagcaccagccccggcaccagacttcgtgaacctcactgagttactcagtgttgctggtccgtttcacaccttccttggataccttgagtc

SEQ ID NO: 24097 - DNA, 261 bp, Glycine max
  Clone ID: 701101313H1
cttccatacatggatatacaatgggattaaaacttgaacagtttatatttgatgcatttccatatgctcctacgactgcactttttgaggtgttacgggaggaggaatttgcaccagtgaaaaatgcaaatggatccaatgttgacactccagacagtgcgaaactacttgttcttcgactccatactcgttgggtagttgctgcaggtggcttcttaacacattcagtgcccttatatgcaacaggtgttgaagtgtcac

SEQ ID NO: 24098 - DNA, 260 bp, Glycine max
  Clone ID: 701101314H1
gttggaagtttgcttaaaagacacggagatttgacagagcgtcttgctagggattctgacaagataatatttgagcgtctacagaaggagtttgaagctgcacgagcttctcaaactgaagagatatgtttagacggggaagagtggaatgatggactactagctacaataagagagcgggtcactatggaggcagacagaaaagcacatgcatggggatgctgacatattagcatgtcctcaggataaaattacatata

SEQ ID NO: 24099 - DNA, 262 bp, Glycine max
  Clone ID: 701101315H1
cctaatcaaaccaaaacaaaagaaaacgaaaatccccaatcctgcgttgtgttgcgacttgcgagccatgagaggggtcgtgaaagcgtttgcggggaatctgttgttccatggaagaaagactcagactcagtgcattcgctcctacagtctgatcccaatggtgatagagcactcttcccgaggtgagaaggcatacgacatcttctcgcgccttctgaaggagcgcattatctgcatcaacggacccatctccgacgac

SEQ ID NO: 24100 - DNA, 266 bp, Glycine max
  Clone ID: 701101316H1
gaaattggttttgtatttttattttattcttctttattcagaatattattatattatgcatacacttgtgcgccgaacatttctttttcttttaccttaatttattgttgcgaatctttgttttgggtcatcgtttgttggttgcaggtaaagaaatctcgttgctttcccactaacgccccactttgtttcttttggtgttgcagatctaaacctcttgtgtgctgttcgcactctagactaactgagattttagctttttattg

SEQ ID NO: 24101 - DNA, 267 bp, Glycine max
  Clone ID: 701101318H1
caagacggtccagtgatcaatagattgccagtcgtcgtgtacgcggaactctccaattctgtttgagcctctctcgcgcactctctctctctctctctcatacacataaaacacacacatatcatccatatactttcctcatcatgtctggttccatcaatccatttgatgctcctgatgaagaatatgcaaatccctacgaacctcctggaggatctcataaacttaactctatatcgacatatggtcgtgtagcatctgatgcta

SEQ ID NO: 24102 - DNA, 265 bp, Glycine max
  Clone ID: 701101319H1
tttgggagttaggttctgcacgctctgcttccagcgagtgttctcacttcgtttcaacaccttaatttgcacacgctgcttcttcagcttgagaaatggcacaagaaacctttctattcacatctgaatctgtaaacgagggtcaccccgacaagctgtgcgaccagatctctgatgcagtgctcgatgcgtgccttgaacaggaccctgacagcaaggttgcctgtgagacatgcaccaagaccaacatggtcatggtctttgg

SEQ ID NO: 24103 - DNA, 263 bp, Glycine max
  Clone ID: 701101320H1
aatttaccagctatacttgttccttttgaaggttagaagtgctacaatacaaacaatggcagctactcaggaagatgtgaagcttttgggtattgtgggaagcccatttgtgtgcagggtccagattgcccttaagttgaagggagttgaatacaaatttttggaagaaaatttgggcaacaagagtgatttgcttctcaaatacaaccctgttcacaagaaggttccagtgtttgttcacaatgagaagcccatagcagagt

SEQ ID NO: 24104 - DNA, 259 bp, Glycine max
  Clone ID: 701101322H1
tagagaagcactcttcgttcttcgactgtctacgatctgctttctctgaattgtgaaaatgtcgctcggagaaactgcttgttcatacgcagctctcatccttcatgaagatggaattagtgtaactgctgacaagatcagcaccttgttgaaaactgcaaaggttccagtagactcttattggccaaccttgtttgctaaacttgctgagaagaaaaatcttggcgatttgatagcaaatgcggcaggcggtggtgca

SEQ ID NO: 24105 - DNA, 257 bp, Glycine max
  Clone ID: 701101323H1
atgggagcattgcttcacagggaaacacaaaacctgacatggagattgtaacaagggttatgggacctgaagttggatatctgaccacaccaataattcttattcagtgtgctcttgttcttctctgccaacgtgacaaccttccaaaaggaggagtttaccctcctgggatcatctttggtccaactgatctccaggaaagacttcaacaaaatggaatatcctttgatgtcatctcaaaaagcaccatttcttga

SEQ ID NO: 24106 - DNA, 260 bp, Glycine max
  Clone ID: 701101324H1
cctcgagccgaatcggctcgagggcaaaattcgcaccctcggcgaactcaaacgctcctcccgcgatgatgattccgattccgatcccgatttcgaacccgacgagtactacaccggcggcgaaaagagtgggatgcttgttcgagatcctaccagaggaaacagcaacaacaacaacagtgtggatgatatctttgatcaagcgaggcaggttgctgttgatgcacctccggagaatcctcgaagctcgtcgaggtcgg

SEQ ID NO: 24107 - DNA, 257 bp, Glycine max
  Clone ID: 701101326H1
ctttgagagagagagagggaggagggagagtgttgacgctccatcaagatgggtatttctagggattccatgcacaagaggcgtgccactggtggcaagaagaaggcatggagaaagaagagaaagtatgagcttgggcgtcaggccgcaaacaccaagttatcaagcaacaaaactatccggaggattcgtgttcgaggtggcaatgttaaatggagggcattgaggttggataccggcaattactcatggggtag

SEQ ID NO: 24108 - DNA, 261 bp, Glycine max
  Clone ID: 701101327H1
ggccaagacaaatcacagaactggcatgtctactctgcttctgcagattctgtaactccatgcgacaatgtttacactctagagatgtgcatgactggcctggatagagagaaagcacaggttttctacaaagaacaatctgcttcagctgccattatgactgttaattctggcattagaaaaattcttccagattctgagatttgtgactttgactttgagccatgtggttattcaatgaactctgttgaaggtgctgct

SEQ ID NO: 24109 - DNA, 238 bp, Glycine max
  Clone ID: 701101328H1
catttgggagttaggttatgcacgctctgcttccagcgagtgttctttcttcgtttcaacaccttaatttgcaactgatgattgtgccgcttgagcactggcacaagaaaactttctattcacatctgaatctgtcaacgagggtcaccccgaaaagctgtgcgaccagatctgtgatgcagtgctcgacgcgtgccttgagcaggacacatgacgcaaggttgactgtgaaacatgc

SEQ ID NO: 24110 - DNA, 252 bp, Glycine max
  Clone ID: 701101330H1
ccctcgagccgaatcggctcgagctttctccgagaacaacaaaaacctcgtgcttcgctcttaccttcgaataacccacaaaaccaacaaacgagaagaggagtgacagcagatggggttgtcgttcacgaagctgttcagcaggttgtttccgaagaaggaaatgaggattctgctggtaggtctcgatgctgctggtaagacaaccatcttgtacaagctcaagcttggcgaaatcgtcaccaccatccc

SEQ ID NO: 24111 - DNA, 266 bp, Glycine max
  Clone ID: 701101332H1
ggagcttcaagactgaccattttgttagtgacacgggggatgttgtgtactatcaaaccgactctaagattaatggctcttccaaattagagtgaatattaaaattcttttctatatagacaagagaggcttatacacaattcttattgctttaaagattgtcttgagtttctccgaaagttactgcacttacttggagttgaatccttcattaataaagggatggatggatcatataatttcaattgtaactgcatgatagaatg

SEQ ID NO: 24112 - DNA, 70 bp, Glycine max
  Clone ID: 701101333H1
ctcgagccgctcgaaccgattccgggcaaggtcgcttggaccggcggtcgaatgatgagccgcagcctca

SEQ ID NO: 24113 - DNA, 268 bp, Glycine max
  Clone ID: 701101334H1
tgaagttgctctctctgtaaccccccaaacccaaaccttcattatctcaattctcacactcccatttctcccttctcttatttattattattacacacatcatcacaattctgtcaatttccccgaagaaaaaaaaaccctaaaaaatttgctcctttggatccatccaggggcacaccccggatctccgattctctagatcactctcaagttctcatctttttcgtttttggcgcagtgggtcgttgttaaatacatggtttctgat

SEQ ID NO: 24114 - DNA, 228 bp, Glycine max
  unsure at all n locations
  Clone ID: 701101303H1
ggtcaggacagtagcacataatcttcttctataacatcgaccggacacgtnctctcgaaaaatgctacctctgcgtccacaatcacaggttggagcaccaaaaacatcactgtctcttgtttcctcagaccccctcctatctcctgatgaacctaggcaaaactctgaccaatctccgtgaatctcaggccgaaagtcgaagtccagaaacagcttggccaagcactt

SEQ ID NO: 24115 - DNA, 197 bp, Glycine max
  Clone ID: 701101243H1
aactaattctactcaacagtacatataatccaccgctttgttcaactcaaatcctcaatcgctcgcgatttcttcttctggaattctcaaggatctcgataaatggcaaccactgcctgtttcatcattgttagcagaaatgacattcctatatatgaagctgaagttggagtagctgctaaaagggaggattctgc

SEQ ID NO: 24116 - DNA, 197 bp, Glycine max
  Clone ID: 701101244H1
ctcgagccgattcggctcgaggcgccactggacaccccagttttgcgatgtcctgctccatcaccaaccaggtcattgaccagcttgagttgtggaaggagaagagtaccggcaagtacgagaagaaggtttacgttttgcccaagcaccttgatgagaaggtggctgcacttcacctgggcaaacttggagctaag

SEQ ID NO: 24117 - DNA, 201 bp, Glycine max
  Clone ID: 701101246H1
ctcgagccgctcgagccgattcggctcgagggaggatttaggcctgggcccagaagctaccactcccaacagcttctatcagtacccaatcttcagcttttgtgaccccaacacctggcatgccggtaagtcatatatggattcagaaatcatctcttgcagctgatcatgcagctgctggaaattttgatactgcaatga

SEQ ID NO: 24118 - DNA, 176 bp, Glycine max
  Clone ID: 701101247H1
aattaatcatcttacttatttattctccgaaaatggttgatttacattggaaatcaaagatgccaagttccgacatgccttccaaaactctaaaactctctctctccgacaacaagtccttaccctctttgcaactacccttccgcacaacatacaacttcaaaaacacaccttct

SEQ ID NO: 24119 - DNA, 200 bp, Glycine max
  Clone ID: 701101248H1
accctccacaaccaccttattcaatctttaaatagcttattgattaatgtcttatagtcttctatgaataagatcttcagattttgttacagtttttcaaattattctgtggcaaggagagaagaaaagatcatagaaagtggtgattcttcgaatattgaagagagcaatatggggttgatattgaaggagacattcta

SEQ ID NO: 24120 - DNA, 127 bp, Glycine max
  Clone ID: 701101249H1
tgagtaaaaacctcaaactaagctccaaacgcttctttcgtaaaaaggaaccatttttagtctaacgctccgagccgccttctttcggatacggatcctcttccgttgactattcgacataacataa

SEQ ID NO: 24121 - DNA, 206 bp, Glycine max
  Clone ID: 701101250H1
caaaaaaggacattcattcatctatggctacccttattgctcccagcaaccactctccccaagaagatgctgaagctctcagaaaggcttttgaaggatggggaactgatgagaacactgtcatagtaattttgggtcatagaactgtgtatcagaggcagcaaatcagaagagtttatgaggaaatttaccaggaggatcttgtg

SEQ ID NO: 24122 - DNA, 201 bp, Glycine max
  Clone ID: 701101251H1
cagatttcggtcttgctagggagggcccaacgggtgatcagacccatgtatctactgcggtaagttgaagtcctataataaattttcactactattcaattatatgacttttcacatatgctattattcgtcaccattccaattactacatttggtccctttgtttgatgcatgaccaatccctaaagccgtaatttaagc

SEQ ID NO: 24123 - DNA, 203 bp, Glycine max
  Clone ID: 701101252H1
cagatgactgatgcagaactgagaaatatggttagcaagaccctcacttgtagaattgataagagagaaaactgcaatgagaagatggaccaatttctaaaaagatgtttctatcattctggtcaatatgattctcaggaaaactttgcagcgctagacaagaagctgaaggaacatgagggtgggagaacttctaatcgcct

SEQ ID NO: 24124 - DNA, 200 bp, Glycine max
  Clone ID: 701101253H1
gtttcgttactcgtattggaacagtagccagagttacgtcttaaccaaaggttggagccggttcgttaaggagaagaatctgaaagctggtgacacggtttgttttcaccggtccactggaccggacaagcagctttacatcgattggaagacgaggaatgttgttaacaacgaggtcgcgttgttcggaccggtcggac

SEQ ID NO: 24125 - DNA, 200 bp, Glycine max
  Clone ID: 701101255H1
catattttaggttgggttacaacagcttgggtgcatttgcaaccattaaccatctccactttcaggcatattacttggctctgccttttccaattgagaaggcccctactaagaaaattgccaagttaagcggtggagtgaaaatatctaaactgttaaactatcctgtcagaggccttgtctttgagggcggtcattct

SEQ ID NO: 24126 - DNA, 201 bp, Glycine max
  Clone ID: 701101256H1
ggagaaattgatgttctttaatgtgaaaaagggttggaacggttttcgattttaataagcctgcaaagagccttcctttgtttttctctttttgagaagaaggctctttgttgttgtttttgaagaaggaaggaagaatgaaaaaaaatgttgaggctatggatttcttatctgcaattgttggagcttttcgtgagttcg

SEQ ID NO: 24127 - DNA, 196 bp, Glycine max
  Clone ID: 701101261H1
cacaagtctccctgttgagacagttgaggttgttgacacagcacatgctgaggaaaagacggggttcctcgacaagattaaggagaagctaccagggcacaagaacacagaggaggccacagctactactcctcctccaccaccacctgttgcatcattggagcatggtgaaggtgctcatcatgaaggagaggcc

SEQ ID NO: 24128 - DNA, 208 bp, Glycine max
  Clone ID: 701101264H1
cggctcgaggacattcagcaacatcaagacataggtttagatgcttatactgactcagtatatggcaaattggatctgaattctgtacaacacatgtttctcaagggaatgtgtagttttggcagtactgattctcacatagttgagctttaccactgctcaggtgcgtcaatgccagcacgatgggagctgttccagaagccagctg

SEQ ID NO: 24129 - DNA, 205 bp, Glycine max
  Clone ID: 701101265H1
gtccaacaaagtggcaatccttaccgatcatttgacagtgatgtgctgcttttcaaatctggctcttcagttccatctgggggtggtgctattgaatttgcttcagctgttaggaagttggcttttcaggattctggtggtatttggaagtatgaaaaaaatggctctggtgatgctgctatcggctcaagtaggacttcaaatg

SEQ ID NO: 24130 - DNA, 204 bp, Glycine max
  Clone ID: 701101266H1
ctcgagccgctcgagccgtttctctctctcattctcttctccatcgcgcgtaagaaacacattttagttactactaatgggaactgttgaagctgcaaacaaggatgcaaatggaagtctcctagagaaaactccttcagttgtttttgtgttaggtggcccaggaagtggaaagggtacccaatgtgcaaatattgtccaaaa

SEQ ID NO: 24131 - DNA, 200 bp, Glycine max
  Clone ID: 701101268H1
gaatggtagagctctccttgttgcatttctgatgtttctgttggcatcagaagtgttgattttggaggctgagggtgcaggagaatgtggaaagacccctatagggtctgcagctgctagcctgagcccatgttacggtgcagttagcaatgtgagggcaaaggttccattggcttgttgtgccagagttggggctttgc

SEQ ID NO: 24132 - DNA, 155 bp, Glycine max
  Clone ID: 701101269H1
cttctctctggctttcctttgacgcttctgacactgctccttttgcttctctccgtgtcctaatggctctccccgactcttcttcctgccgcaactccctgttcccctccttcatctactcctcttcctccaaaacgctcccttcacacaacata

SEQ ID NO: 24133 - DNA, 58 bp, Glycine max
  Clone ID: 701101270H1
caagcatacgcacaagcacacgcacaagcacttctctaattcccttccacacaacata

SEQ ID NO: 24134 - DNA, 199 bp, Glycine max
  Clone ID: 701101272H1
ctctctctctctctctctctcattcacacgaatcacactctccacagtgcgattcattcaccaatggatcgcaacggtgttctctctcttgcattcatctgcattgtagtcgccggcgtcggaggccagtctcccgtcgcagcgccctcgaacactccggcaacccccgccgccgccactcccgcccaagcaccttcca

SEQ ID NO: 24135 - DNA, 105 bp, Glycine max
  Clone ID: 701101281H1
ccgtgttccaggagatggttcatgaattacgtaatgggagagaaaatcctgatggtgcagaccagggtttcatagctagctatttcccagagttacttgataagc

SEQ ID NO: 24136 - DNA, 200 bp, Glycine max
  Clone ID: 701101282H1
caaggatcctcgagaattgccatggaagaagactgttgttccagtggagtccatttcaactaagactccgactgatgcacaagaaaagaaatacaaagagcttgctgaattgggaggaatattggaagagaatagagatttatcttcattatcaaggtctaaacttgtagacagccagtttgatattgatggatctatgg

SEQ ID NO: 24137 - DNA, 198 bp, Glycine max
  unsure at all n locations
  Clone ID: 701101284H1
tagcctttgtttactcttcttctcttgcggctatggttttagcgcagttcttctagatttaagtatgatgggtaagtaaaaggttcacatcagtattgtggtcattggccatgttgactctgggaaatccattaccactggtcacttgatttacaagctttgaggcanngacaagcgtgttattgagaggtttgagaa

SEQ ID NO: 24138 - DNA, 196 bp, Glycine max
  Clone ID: 701101285H1
gtttgcttgtcaatgacactgtcttacatcttgtcgttgatactttgccatttgggggagctggggagagtggaatgggtgcataccatgggaagttctcttttgatgcttttacacacaaaaaggcagttctttatcgcagttttgctggtgattcatcattaaggtacccaccatacacggatacaaagctgag

SEQ ID NO: 24139 - DNA, 199 bp, Glycine max
  Clone ID: 701101242H1
cggcgaggagggtggcgccaccgccgagggcgagaagaagaagaagaagaaggagaagaagaagcatgaacatggccatgacagcagctgcagcagtgacagtgattagattatctcccactgctgcatcacctatatatcttataaggtgtatgggaccatagtagtgagggctgtgtctttctctttttttcctact

SEQ ID NO: 24140 - DNA, 196 bp, Glycine max
  Clone ID: 701101286H1
tgttgatccatctcttgtttcttgctttctttcttcaccatgtcacttgctgggaaaatcaccactgaaatcggggttcatgcaaccgctacaaagtggttcaacctcttcgcaacacaactccatcatgttcaaaacctaactgatagagtgcatggaaccaagctgcatcaaggtgaagactggcatcacaacg

SEQ ID NO: 24141 - DNA, 196 bp, Glycine max
  Clone ID: 701101288H1
attccattctctctgtgtatttccctacctctcccttcaagatgcagatcttcgtcaagaccctcaccggcaagaccatcacccttgaggtggaaagctctgacaccatcgacaacgtcaaggccaagatccaggacaaggaaggaatccccccggaccagcaacgtctcattttcgccggaaagcaacttgagga

SEQ ID NO: 24142 - DNA, 259 bp, Glycine max
  Clone ID: 701101301H1
ctttgtttcttattgagtttttggcttctcacttctttttttctttcacactctcaacgaagcagtttataacagtgtttaattgaaattccaaacatggattgggttcgaggagacgctgtcggacgaggaagctttgctaccgttagtttagctattccaacggcgaattacaatcagtttccgtctctaaccgtggttaagtccgctgacgctcaaacctcgtgctggctcagaaacgagaaacacgtgctggatc

SEQ ID NO: 24143 - DNA, 267 bp, Glycine max
  Clone ID: 701101302H1
attctaaggacatcaaggacatgggctgccgctatgctaacccgcccatgcaagtgaaggcagactttggctcggttatggatgttttgaagacgtatttgcagagtaaggctcattaggttagcattgcaagttttgctcctcctgagtttgctcattatttacttacttttaggcactactgctgtattgtcttttctatgagctaggtttgagtgttgtaagaatttgcttgctgcattatgtatgccgtctagtgttccatat

SEQ ID NO: 24144 - DNA, 151 bp, Glycine max
  Clone ID: 701101168H1
ctcgagccgtgagatcaaggttccctggtgggatgtttggtgatgacatgtttgcatcttttcgggaagggggaggagtacatatgagtcaaggtgcatctcggaaagctcctcccattgagagtaaattgccctgcactcttgaggagat

SEQ ID NO: 24145 - DNA, 150 bp, Glycine max
  Clone ID: 701101169H1
ctgagaagggctgaagaaaatagagggcttttggctgcatcaggtcctgataggcaattgatgagaaaggagttgggaagaagattaaaagctgcaatgttctaaatttgtcagaaatcaggattcattgactttttgtacaaattagag

SEQ ID NO: 24146 - DNA, 149 bp, Glycine max
  Clone ID: 701101170H1
gtcctaaagaccgtgagggtgtgaaggaggaagtgattgttgatcttgttgaccagtgccgttcataccaaaagcgtgtcatgcttcttgtgaacaatactacggatgagcaacttttaggtcagggattggcactgaatgacagcctt

SEQ ID NO: 24147 - DNA, 151 bp, Glycine max
  Clone ID: 701101172H1
gtcgcggacacagaacagagcttgcagaagcgatttctcatttctcattcttaacaacacacttcaacaatggccaaaaccttcaaatacatcatcctcggaggaggagtttccgctggttatgcggcgagggagtttgccaaacagggcg

SEQ ID NO: 24148 - DNA, 150 bp, Glycine max
  Clone ID: 701101185H1
cgatgatggtatggtgttggatgaaggggaagatggatttcctgttcaagaggaaaataaatattcagaatttgatggtgatggagcttctcttagattgggagattctgacgaagaaactgacaatgattcagtgatgatggaagtaga

SEQ ID NO: 24149 - DNA, 150 bp, Glycine max
  Clone ID: 701101186H1
tattactgctaatggctctgttgactatgattttatgcgaatagaccttttctttgtgattttatgcaaaaaaaaaaaaaaaaaaaaaaaaaaaaaaaaaaaaaagaggggggcccccccacaggtgcccccccccccccgggaattttt

SEQ ID NO: 24150 - DNA, 150 bp, Glycine max
  Clone ID: 701101188H1
ggacgatgcggccgtggtgtctctagattcgctgccgttagggttccgattccgacctaccgacgaggaactcgtcaattactacctgcgacagaagatcaacggtaatggtcgcgaggtttgggttatccgagaaattgatgtctgcaa

SEQ ID NO: 24151 - DNA, 148 bp, Glycine max
  Clone ID: 701101189H1
ctcgagccgctcgagccgcatttctagacacattaccctcacaaagtaagcaatggcataccacaactacaacaactatgggtggcgatgcccctctgacgagtaccaagtgtacgaccccccagtagaggcaacatatcctaggcaa

SEQ ID NO: 24152 - DNA, 149 bp, Glycine max
  Clone ID: 701101191H1
atgatgagaagctgaagagatgggtggaggaaggtgctgaagttccagctgaagaagcttctgctctgccaccgcctccaacaactgctgctttccagaatggttcaactgaatacaactcgagatttgcattgaagactgaaagttca

SEQ ID NO: 24153 - DNA, 149 bp, Glycine max
  Clone ID: 701101192H1
ctcgagccgagaaatttagaaaacatggcagcggtggccggagcatcctcgtccgtgattaaacgtggctgcgctttcgggttctttaaggaaaggttcttacaacagaggcctcattcgttctgctattgagctaagcaaaggtagag

SEQ ID NO: 24154 - DNA, 152 bp, Glycine max
  Clone ID: 701101195H1
gtagattttgcttataactggctttcaggttatgagggtggtgtcatccaagcttctgagttccgtacttatcacacaccagttaatagacaagtatgcagtgtgataagtgatgatcttattttcattgctttggcatatttctcttcata

SEQ ID NO: 24155 - DNA, 193 bp, Glycine max
  Clone ID: 701101201H1
tctctgtgttgtgttgtgtacttgtgttaattgtgttgttgttgtaggacatttaagtgaagagagaatgatgatgaagtctgctatgtgtgcattggtgcttgaggcactggttgtggttgaagtggggcccatggctgaggctgcggtgacttgcaacccaacacagttgactccttgtcttccggcaatt

SEQ ID NO: 24156 - DNA, 106 bp, Glycine max
  Clone ID: 701101202H1
atgacgatttcatggctctggtatatgttacaatcaatgtgtatgctgaactcgcctctagtgctctgtgcatcaatggaattagctttgcactaggagaagttag

SEQ ID NO: 24157 - DNA, 104 bp, Glycine max
  Clone ID: 701101209H1
ttttagaatgaaaactgatatcagtagtgaatgaaataatgcactgtccagtgggattctcgcttctgtacttgttgatctgttataggtaacagggaatctta

SEQ ID NO: 24158 - DNA, 203 bp, Glycine max
  Clone ID: 701101211H1
caatttccagagaatatcgcacgaatcctaccctcccccagggcacggatctccttaccctccaccccaaccgggttacccatcggcgccgcctcatgaagggtaccctccgccgccgccgcctccgggatatggtgggtaccctccaccgcatccgccgcagcgtccgccgtatgactcctaccagggctacttcgacaacg

SEQ ID NO: 24159 - DNA, 201 bp, Glycine max
  Clone ID: 701101214H1
ctcgagccgttcggaacaagttggatgagagcctcctcattcattggtctgggattcagaccaggaggagttcgtggcaagatggtgttcttggcacaaactgtcctattcctgcaaagtggaactggacttaccagtttcaggtgaaggatcaaattggaagctttttctacttcccttcccttcatcttcagagagctg

SEQ ID NO: 24160 - DNA, 205 bp, Glycine max
  Clone ID: 701101215H1
ctcgagccgattcggctcgagtgtggtggaggaggaatacacgacgcaatatataggcaacgaaatgaggcgttttgactggccttttcggatctgatcgaatccaaaccctaatctaatcccacaagcctattagtctcattcaatcgaagaagcgagcgagtctgtgtctctctcccaggccatgcgaccaccctgttcctcc

SEQ ID NO: 24161 - DNA, 205 bp, Glycine max
  Clone ID: 701101216H1
gctttcttgttttgctattgcttgctccgcaatcataatttcatcatcgaatcaaatcaattttgaaggttcattataatggcggaagagataaccaagaacgacgtcggagtaacctccaaaaccaccagaagcagctccaggttctggcctcgttggattcccacttccaccgatcacatcatatacgccgagaagcgccttc

SEQ ID NO: 24162 - DNA, 199 bp, Glycine max
  Clone ID: 701101227H1
gggagctcgaggtgcttcggggctttgtattggacatggtggtggacagagatgtcagaaacctggatgcaacaaaggtgctgagagccgaactgcttattgcaaggcccatggtggagggaagaggtgccaacacttgggatgtactaaaagtgctgaggggaagacggattattgcattgctcatggcggtggtagg

SEQ ID NO: 24163 - DNA, 200 bp, Glycine max
  Clone ID: 701101228H1
gtttgttttcggcctttgatcttcgattctctctctttttctctcgcgaaaaccgtatcagcaatgtctggagaatcagccagcgctattcacaagggtcaagtcgatctcttagacttcattgactggtctggggttgaatgcctcaatcaaagctccacccactctctccccaatgctatcaaacagggttatagaga

SEQ ID NO: 24164 - DNA, 200 bp, Glycine max
  Clone ID: 701101229H1
cacaagccaagtgaaagtgagaaaaaataaaaatcaaagagcataatgtcagggatcattcacaagattggggagacccttcatgtgggagggcacaagaaggaggaggagcataagggtgagcaccatgctggagaatacaaaggggagcaccatggtgaacacagtagtgagtacaaaggagagcatcatggtgaaca

SEQ ID NO: 24165 - DNA, 202 bp, Glycine max
  Clone ID: 701101230H1
tgaaatggtactgtagctcagtcgactttcaaaaggcagaagattaattaattttctgcaagtgaggcatgtggggattggggaccgtactttttccaatcaaattacacgtaacttgacattgacgccaaatccaagactccttggaagcgtagttttcttgccactagcaattggaatgatataaacatctctccatttt

SEQ ID NO: 24166 - DNA, 202 bp, Glycine max
  Clone ID: 701101231H1
ggcaacagaggagagaagatgaagttcaatccacgagtgtcgagcagccgccgcaagagccgaaaggctcacttcacggcgccgtcgagcgtgcggagggtgctgatgagcgcccctctgtcggcggactccggtcgaagtacaacgtgcggtcgatcccagtccgcaaggaggacgaggtgcaggtggtgcgcggaacata

SEQ ID NO: 24167 - DNA, 171 bp, Glycine max
  Clone ID: 701101232H1
tctccctccatggcaatggctaactctttctctgccgtgatcctccaccgccctcccatcaccgccctcgatcttctcctcatcttcctccataccctcttatagctctcacccgacaaagcaaaaaaagcacactttttttttttctttctgttttcggtttttttttta

SEQ ID NO: 24168 - DNA, 210 bp, Glycine max
  Clone ID: 701101233H1
attaacatatacaaattctctgtgttgtgctgtgtacttgtgttaattgtgttgttgttgtaggaaatttaagtgaagagagaatgatgatgaagtctgctatgtgtgcattggtgcttgtggcactggttgtggttgaagtggggcccatggctgaggctgcggtgacttgcaacccaacacagttgactccttgtcttccggcaatta

SEQ ID NO: 24169 - DNA, 206 bp, Glycine max
  Clone ID: 701101234H1
ctttgtcttttttctattatagaatgactcttatatttgttcaaatcaatatatatgctgactttcctctattgctctgttcagcaatggaattagctttgtctttggagaagttagtgaatgagaaacttctgaatgtgcacagtgtggcagatcgcaacaatgaccctcaattggcagacttcattgaaagcgagtttttgtct

SEQ ID NO: 24170 - DNA, 205 bp, Glycine max
  Clone ID: 701101235H1
ctcatcaaagagacgcccaggcggcggtgccacaatcgctaactgcggcgaccctgggcgactgtgagggtgcgaacaagaagagctcttaggttttcaaaaccattaatcgttgctgcttatttgatttgtttgagcaattatgaacaatgttgctgaaagaccgcttaacggagacgtagaggatgatgatgaggatgatggt

SEQ ID NO: 24171 - DNA, 153 bp, Glycine max
  Clone ID: 701101167H1
taaacactaccctgctgcaccaaagtgccaagtcacacgcacaaccattttcttttctttctctctcactctccaacttgcacccaacccaataatgacaataacaaactcaacctcgccaggatccaacacaacgcactccttacacagacc

SEQ ID NO: 24172 - DNA, 204 bp, Glycine max
  Clone ID: 701101236H1
ggctgatcccaagcctcgtcttcgttggactcaggacttgcatgaacggttcgttgatgcggtaacgagcttgggggagcaagtaaagctacaccaaaagcaatcatgcggaccatgaatgtcaagggtttgactctgtttcatttgaagagtcatcttcagaaatacaggcttggtaagcaatctgggaaggatgtgggtgaa

SEQ ID NO: 24173 - DNA, 204 bp, Glycine max
  Clone ID: 701101237H1
aaaaagtcttaatttgtttcttgttttctctgtcgtttcgttcccttaatctttgatctctgagttacaagttataacaaaagaaataaacaacacatataaatatttgtaagaaaatatatatatgatcatgggttttcttcacaaactatgggacgaaacgtagtcgggtccagcaccggaaacgggtctggggaagctccg

SEQ ID NO: 24174 - DNA, 202 bp, Glycine max
  Clone ID: 701101238H1
cagcattcgttgcggcattttaatcgatttatccaagcaggactgaatgaactaatggagtctaaagtcgcgaaaaagaagtctagtagtagtagtagtaaatcattgttctacgaagctcccctcggatacagcattgaagacgttagaccaaacggtggaatcaagaaattcagatctgctgcttactccaactgcgctc

SEQ ID NO: 24175 - DNA, 203 bp, Glycine max
  Clone ID: 701101239H1
caacagaatctactctctttttttctaccttagattccttctccaacaatggctctcgccgtttccactacttcttcctcttaagcagctgctgcagcttctagctccttcttctctcgtctcggatcttcctccgacgcaaaagcttctcaaatcggttcgtttcggtttccggagaggtcgcttgtttcgtctgttgttgt

SEQ ID NO: 24176 - DNA, 202 bp, Glycine max
  Clone ID: 701101240H1
cgatgtctggtgagattccatgtgccacacctgatactcaatctgtgcgaactacttcaggttctctgggcccatctgaaaaggttcactcacttccctatgttgatccaaggcaaccagttccagtaagaattgtggacccatcaaaggacttgaattcttatggtctgggaaatgttgactggacagacagggttgaagg

SEQ ID NO: 24177 - DNA, 199 bp, Glycine max
  Clone ID: 701101241H1
tctctaaccattctcttgaggctgcaaaggttgctgtcacgtcgtttgttagaagtacattttctcatcttctgcaagacatctcagattccctcttacaaatcctgaaaaaggatggagcagaacagtgcactcttgatgttgttcttgatgcaagtacaaaagcagttctccaaggaggactgaatgtgttgctgga

SEQ ID NO: 24178 - DNA, 59 bp, Glycine max
  Clone ID: 701101112H1
ctgtttctctatgtagaatttcaagctctatctctcgctcgcatatctcggaaaatttt

SEQ ID NO: 24179 - DNA, 155 bp, Glycine max
  Clone ID: 701101114H1
acagctttcttctattgagagacagatggaagttccctatgtttgcagtgtgatatgattgatcatgttggaggaaaagaaagcatggaagatctcttctgatcaggcaaagagttgagtttccaggagatcaatctcgtcatgatgaaaatccg

SEQ ID NO: 24180 - DNA, 157 bp, Glycine max
  Clone ID: 701101115H1
tgtgacccatgcaactgcaagtaaggtcaagatgtataaccttgaagcagagatagctgtcatatatgtatcaacaaataataagaagtagaagttgcgtttggagctttagaataaagtgtatgctatgtgttttgttggtcttttataaatatgt

SEQ ID NO: 24181 - DNA, 141 bp, Glycine max
  Clone ID: 701101117H1
acataacacaaaactacaaaacagaccacttccgatcatgaccatgatcatgatcatgttaacattcccgtcattgacctgaaacatgttctctcggaggatccgatcctccgagaaacagtgtttgggcaggtggaccag

SEQ ID NO: 24182 - DNA, 143 bp, Glycine max
  Clone ID: 701101119H1
agctcgagccgtgaagaccgacgtgtgcgccatcatcgacgatctgctcgacacctttgacggcccactcgacgaagagatcgaggattagccagccagatatcgcgaaacgatgaagcaagatgcgttggcacgattgaagc

SEQ ID NO: 24183 - DNA, 153 bp, Glycine max
  Clone ID: 701101120H1
ctagtcctgattcctagctctataaaaggagaataccataggcatctctcacagacaaacaaaccatttaccagctatccttgttccttttgaaggttagaagtgctacaataaaaaccatggcagctaatcaggaagatgtgaagcttttgg

SEQ ID NO: 24184 - DNA, 157 bp, Glycine max
  Clone ID: 701101123H1
cctcgagccgattcggatcgagcaacttctaacacatacactactccctctctctctcttatcgtatggccgccaattccaacagccgagggatcaccgccttagggaagcgagtcgccaaccggatctggacttccaacgcacctcctctcacttc

SEQ ID NO: 24185 - DNA, 157 bp, Glycine max
  Clone ID: 701101125H1
tgtttccactagcattatttgcccattaacaatcaattttcagctctcattttcatttctttgcaattcctccacacacaccatacaattcgagtctttgatattttaatcacagagagagaagagggtttgtttatgggttttggaaatttcagcc

SEQ ID NO: 24186 - DNA, 158 bp, Glycine max
  Clone ID: 701101126H1
agcgatgaaggaggaagaagtagtggagatacaagttcagtctcatagatggatacgacatcggaccaatacgttactccccagactcagccatcgaactgctcgaggaccgcatttttgaagactggaccaaagacaagaagattatacaaaaagca

SEQ ID NO: 24187 - DNA, 154 bp, Glycine max
  Clone ID: 701101127H1
gttaatttgttgagagagagcaatcaagaacattcatggagtcttcacaggagagagcagacaacaccaattaaccaccacctgataggctgatacaatacagtctcctatcctttttcgacaaccagactggctgcgaaatctagttcgagtt

SEQ ID NO: 24188 - DNA, 153 bp, Glycine max
  Clone ID: 701101128H1
aggacgaagagcaccatttcgagtccaaggcagacgccggtgcctccaaaacctaccctcagcaagccggtaccattcgcaagaacggatacatcgtcatcaaaggacgcccctgcaaggttgtggaagtttcgacttccaaaactggaaagc

SEQ ID NO: 24189 - DNA, 159 bp, Glycine max
  Clone ID: 701101130H1
actcgagccgaatcggctcgagaggagtttcaaccattgaactttgatatatattatgacccacagaagcgagctactggataccaaattattctcccctgtacttgcacatattcaaccagaatttcattatcaagcaaacatcgaatcagatggtcg

SEQ ID NO: 24190 - DNA, 156 bp, Glycine max
  Clone ID: 701101131H1
cttgaaggatcaaatgagccctgcttattctgctagaaagcaatcattggatcatgaaggcaaacttcacatgcctcatccatggcctgtaatgccctctagtctgtcactgagcatcttggactctaatacaacaggtcctgcacatggtggtga

SEQ ID NO: 24191 - DNA, 157 bp, Glycine max
  Clone ID: 701101132H1
gcagaagcttgtgtgtattatacccaataactacaccaccattgtcaatctctatttcgattaaaaaggttgtggccaatggagcggtattgtgttttcatgttaagaacgatatgttacacaggaagtcacggtcagagtttgtaatggagaaagt

SEQ ID NO: 24192 - DNA, 160 bp, Glycine max
  Clone ID: 701101133H1
cgaaccgattcaagaagaaccgcaagacgcgcggccacgtgagcgacggtcatggccgtatcggaaagcaccgtaagccccccggcggccggggaaacgccggtggcatgcatcaccacaggatcctgttcgacaagtaccatccgggcttcttcggtaa

SEQ ID NO: 24193 - DNA, 158 bp, Glycine max
  Clone ID: 701101134H1
atctagcatgagaactccagggccatcttcagtcaccaaggatgctagattatctcaacagggttcccatgcacaagggtgggctggacaaccatctcaacaaccaaatggatctcgcgggccagttgcctgggcaaaccctgtaaagaggctaaaaa

SEQ ID NO: 24194 - DNA, 157 bp, Glycine max
  Clone ID: 701101135H1
gtttcaggatcaaattcgtctgaatatggtgttccaggggggtttgaacacattaagaagaatttatctggagataatgtattggacttgttcacatatcatagaatgggagcatcattcatctctccagagcattttccttagttcactgagtttg

SEQ ID NO: 24195 - DNA, 156 bp, Glycine max
  Clone ID: 701101137H1
ggccattgctggtcttagtagccaaaaccctggagttattaccattgcaaatgctgtgtttggatctaaacctcctatctctgatgaagttcttgccaaagcttttcaagtgggcaaaaacgtaatcgactaccttcagaagcaattctggtacaa

SEQ ID NO: 24196 - DNA, 156 bp, Glycine max
  Clone ID: 701101138H1
tgttactttccaatttgaattgttccattttcatttctttagcaaaagttgcaactacttcctcagaaaaaaagtttctaagttaaggaaatccagacacaacaaaatacgcggtgacggtgcagctacatgcatagacatcctccttgctatcat

SEQ ID NO: 24197 - DNA, 113 bp, Glycine max
  Clone ID: 701101139H1
tgtgtaatgcaggaagcgactccgcgcttcagcctctcaaacgcaacttcattatccaattgccttcgcaaaatgtcggggaagcgaaagaggaagctgaaattgttaagcga

SEQ ID NO: 24198 - DNA, 155 bp, Glycine max
  Clone ID: 701101140H1
agagatttcaacaagttcaagcccatgcacatgtatgacatagtggtgaagaacaagaacgcttttgaagttagggacatgtagggtagggtagggaagagacaagacaacatacatatagggaccaaacaaacaaccccttgcaaggccttcgg

SEQ ID NO: 24199 - DNA, 128 bp, Glycine max
  Clone ID: 701101141H1
tcggaacgcgccgctcgaggtctcactggtgaccggttccacattgctacatgtggtgggtggggtgcatcatggcggaggtgactattcagggaaggaccctaccggggttgacagtcgtggtgcct

SEQ ID NO: 24200 - DNA, 131 bp, Glycine max
  Clone ID: 701101142H1
cttcacaatcgcaaatcttctatgccaaatcgtagatctacggaaaaatacgttatacatcggagcttacatgtcaaatacgaggattcccagatctgaatatacatctttcggcacacccgagtatgtcc

SEQ ID NO: 24201 - DNA, 155 bp, Glycine max
  Clone ID: 701101143H1
ggtgaacacagagtttgagcgtgttcttaagtatattgatgaggatggggatggtaagatttctccatgtgagcttaggaaccggctaggcatgattggtggtgagttgttgaccaaagatgctgaaaagttgattgaggagttggattctgatg

SEQ ID NO: 24202 - DNA, 152 bp, Glycine max
  Clone ID: 701101144H1
ggctgctggtggttccattcccacacaatagagtagacgagtgataaaaactcgtgaagcttctgatcggagctgctgatttcgccctctgtttatctttccctggattactcgttgagaattacgtccaaggtctgaacgatggattatgg

SEQ ID NO: 24203 - DNA, 150 bp, Glycine max
  Clone ID: 701101145H1
cttctctctttaccttcttaacgcaccaagcgaaggacaaagcgctttctaacttaagtgatggcgaacgcagctgaagtttcagccttgaaccgcatcaaactgcatcttttgggtgaactctctccactggccactcccctaaactat

SEQ ID NO: 24204 - DNA, 152 bp, Glycine max
  Clone ID: 701101146H1
tacgagcgcctatagtccttgccagtcatcccaccagctcgccaaggccaagcatatcgagccactcaaggcatgcaatataatcgaaggggatgccgaggatctcccctttcgaactgattatgtcgatagatatgtatccgcaggaagta

SEQ ID NO: 24205 - DNA, 158 bp, Glycine max
  Clone ID: 701101147H1
gtgcgttgaagtctgctaggttcgtgagcaggttcgaggaaccttaccaaagcgaggaagagatgaaggagaggtacgagatattctcgcagaatctcaggttcatccgctcccacaacaagaagcgtttgccctatactctctctgttaatcatttt

SEQ ID NO: 24206 - DNA, 155 bp, Glycine max
  Clone ID: 701101111H1
aaaaatccatttggaaaaaggaaagataatcttcctgatgctgttcctagtgcaaatggagctccaccaacaatgacttatcagtagcttgaaggggatgtactctgttctttatgctccgacaaatattactacataataggatgcatcttgct

SEQ ID NO: 24207 - DNA, 150 bp, Glycine max
  Clone ID: 701101148H1
ccatgatgttgttcttggaagacggaacactaggactcacaatggtcatcagttgaggctatgattcatcaacggatatgcactttgcaagagtattaacccatatgaagctgctgcttatggtgctgcagtgcaggctgcgattctcag

SEQ ID NO: 24208 - DNA, 155 bp, Glycine max
  Clone ID: 701101149H1
ctctcaccttctacattactctctcttctcctacacatttctaaaggttccattgcatcatctgactcactcctcagtagctctgagactgaaccctatccccatacaaaccttatccctcccccaaatgcccagcctcagatcaaccagattcc

SEQ ID NO: 24209 - DNA, 155 bp, Glycine max
  Clone ID: 701101152H1
cctcgagccgaatcggctcgagagcaattgtcagctggatattgttcgagtgtttagggaatcaaaatgtctcaattgtaaccgaaaaagaggttcggacactatccagtactaatgcatctgaactgttggaagctgtggttaaaactgtgaat

SEQ ID NO: 24210 - DNA, 154 bp, Glycine max
  Clone ID: 701101156H1
gcagaatcatttaagagtagctctaagaagaagaaaaaaaatatgaaggttgtgtacttccttgttgccatcttggctttgacatcctctcttgtctctgcctctgaccctagtcctcttcaagattttggtgtggcagccaaagaaaaagatg

SEQ ID NO: 24211 - DNA, 152 bp, Glycine max
  Clone ID: 701101159H1
atgagcttgaagaactgggtagatttctgatcagagactgatttgtttggatggcaagtgcttgtggttgaagtcgaccattggaaataagttggtcagcaggagtgatcttgattggattgacagcagaattcaagtttgctttagtgctg

SEQ ID NO: 24212 - DNA, 58 bp, Glycine max
  Clone ID: 701101160H1
ggaattagggtcgagctcgaggagctttctgaaacagagaatggctccaggcagattc

SEQ ID NO: 24213 - DNA, 151 bp, Glycine max
  Clone ID: 701101161H1
aagagctcaagtgaaatcattggaagaacttgtcagcaaacttcaggctgatttggttggtggtgctaacaaaaatatgttaggtctagtcattgaagcagaacctgaacttgcaccgaaaaacgtggaaaatgaggagataaaccagctc

SEQ ID NO: 24214 - DNA, 131 bp, Glycine max
  Clone ID: 701101162H1
attatggcgtagagcgacgagcgacacgggtaaacacgcttaactcattcagcaatgcacgaggatccactaagtggtgaagatgaaaaggatcctaagcacaaccacacagagggagcaccacaaacaac

SEQ ID NO: 24215 - DNA, 155 bp, Glycine max
  Clone ID: 701101163H1
ttcgttcttcgcccgacacatttttcttctccgatctcctattcctcctcctatttttgttactcgaagcgagattgatagatagatcgatcctctctatgggttaaagttaaatctgaatccgaatatgatctaatcattttcattttaggtct

SEQ ID NO: 24216 - DNA, 156 bp, Glycine max
  Clone ID: 701101164H1
gtttgtatgacctcgccaacattgtgcccacattggccaagttttatcatcaggccagtgaagcctatgaacaagcttgtacacgccatattagcatgattatctactatcaatttgaacgccttttccagtttacccgaaggattgaggacttga

SEQ ID NO: 24217 - DNA, 147 bp, Glycine max
  Clone ID: 701101166H1
gttttctcaatttccgcttattttcgttccagccagagccagcttttccattttcccctttaaattttctccgaatccaaacggaaccgtaatcggttcctaatccctttttggttggtatgttccttctctcttcccggcaaggtc

SEQ ID NO: 24218 - DNA, 257 bp, Glycine max
  Clone ID: 701101067H1
ctggtcccacacatgctggaggctgaagcaggcgagtagagcctgaaagaacactgactgatgcacagagggatgaatttgaggatatgctgcgtgctttaacattagagaggagccagataaaagaggctatgggattttctttagataatgccgatgctgctggcgaggtagttgaagttttgactgaatccttgacacttaaagaaacccctattccaactaaaattgcacggcttatgcttgtctctgatatt

SEQ ID NO: 24219 - DNA, 262 bp, Glycine max
  Clone ID: 701101069H1
ggttatgtcaaacgaagaagcagtggaatctattcgacaaataaaggatgctcaagctgcagcaaagcaattgattgaagaggcagtttgcaagaaaagtaaggatgacatatcttgcatagttgtgaggttccaatgacatgtttttggttaagcacaggaatcctttccgaaacccaagaatgaaggccctgctggacatttagctagcactgattgcatgtataaatgattcaataataacttttgctttttcacgaga

SEQ ID NO: 24220 - DNA, 262 bp, Glycine max
  Clone ID: 701101070H1
atccattcactaatcactaccaattgctaaagatatttcactcactgtccacactactaatacagttttctggagatggcttcaactgtctcttacatgcttctacttcccgctctagtgatggttgcctctgctggggacttaaacaaagactttgacatcacatggggagatggccgctccaagatactaaaccatggagagttactcactctttcattggacaaagcatctggctcaggttttcaatcaaagaatgagt

SEQ ID NO: 24221 - DNA, 262 bp, Glycine max
  Clone ID: 701101071H1
cggctcgagtgttgcaccaacttgggctggtccactccctatcgtgtttggtcgagactctagcatggaaacaagatatggtcttctaagaggcacattaaaggcccctgcagttggctggatgatgtataacatgcttgttagcaacgagaatgctatccaatcacagtacaaatcccatgtatatgccaaccctgacaatgtgactccaggaattgtggaaagcagatatgcattgaccaaacgaaaaggagcacgttac

SEQ ID NO: 24222 - DNA, 262 bp, Glycine max
  Clone ID: 701101072H1
gcatgacaaagccatgctcattggggctgatcccacgcatgttggagataggtgcctgagggtgaccatacaccattcgttttttcaatgggactcgacagaggcaacctcgtgttaggtttgcaaaagtgcatctgtacaataactatatcagaaactggggcatatatgctgtttgtgctagtgtggaatcccagatattctcgcaacataatatctatcaagccggccagaagaacagtggcctttaagtaccttactg

SEQ ID NO: 24223 - DNA, 262 bp, Glycine max
  Clone ID: 701101073H1
cagcactcaaatcctctgagagaaaaaaaaattagggttttgcatttcgggtcagacagactcagacatgggaggaggcaatgcccagaagtcaaagatggctcgcgagaagaacctcgagaagcagagggctgccgctaagggaagccagttggattcaaacaagaaagccatgtctattcagtgcaaggtgtgcatgcaaacatttatatgcaccacatcagaagtgcagtgcaaggagcatgctgaagccaaacacccc

SEQ ID NO: 24224 - DNA, 259 bp, Glycine max
  Clone ID: 701101074H1
cgctcgagccgaatcggctcgagcgagctcgagctctcacgagaagagtactactaactgtgacgtaatacctcagtggagcacaagatgaactcatggaacatgagaacttccaagttactctctcaacaacttgcttatcctccttatcgcttggtagacgagattccaaccatgggaaattccagttgtgtgagcaaagagccacgaggttcacagatgacaatcttttatggtggccagttcttgtcttggatga

SEQ ID NO: 24225 - DNA, 257 bp, Glycine max
  Clone ID: 701101075H1
cactgaagcccttgctgctgtttccgactctagtgacagctcgaaagacaaatcagatcagaagactctccgcaggcttgctcagaaccgtgaagctgccagacaaagccgcttgcgaaagacagcgtatgtccaacagttggaaagtagtcgtttgaagctgacccaactagagcaagagcttcagcgagctaggcagcatgggattttcatatctagctcgggtgatcaagcacatacattgagtggaaatgggg

SEQ ID NO: 24226 - DNA, 257 bp, Glycine max
  Clone ID: 701101077H1
gagtttcttacggacgacgacgtatccattgagctctcgacggtggctctcgatccgccaccgtccgatctcctcctccgtaactgacgacggtgtttcgatatcttacatctctctctagccacagttcttcctggtctaaaggagtagtggagagctctggaagtcaacaattggcataaggagcttacatatgatgagtgggtaccgatcactgtatctggtgcacgtccagctgctcgctacaagcatgctac

SEQ ID NO: 24227 - DNA, 259 bp, Glycine max
  Clone ID: 701101078H1
ctctgctaaggcgtgttcaacaatcggcggcgaaaatgccttcccacaagaccttcaggatcaagaagaaactcgccaagaagatgaggcagaacaggcccatcccttactggatccgcatgagaaccgacaataccatcaggtacaatgctaagcgcaggcactggcgccgcaccaagcttggattttaaggtcgatgccaacctccgactcgagatttttgttttggttttggttttctagaatgtcacgagcgatg

SEQ ID NO: 24228 - DNA, 260 bp, Glycine max
  Clone ID: 701101079H1
cttttactcacaatttccattgcatcaaaacggtaacattgcacaaccaaaaaataaattgtgagtaaaaggagaaaaggaaattttatcagaattttgtaccaattgattgcattttgagagggtgaaaaaggtctctgcaatgtattctttaacgaaattccaaaattgtttcctttgatcctcccaagcaaaccgacattgaccttggggaggagttcaagttcaactcagttgcgcaggtcacattgaccggtttg

SEQ ID NO: 24229 - DNA, 250 bp, Glycine max
  Clone ID: 701101080H1
gttggacgagagcctcctcattcattggtctgggattcagcaaaggaggacttcgtggcaagatgacgttcttggcacaaactgtcctattcctgcaaagtggaactggacttaccagtttcaggtgaaggatcaaattggacgctttttctacttcccttcccttcatcttcagagcgctgctggtggatttaggggtttcatcataaacaacagacccatcattccgattccttttgatacccccatg

SEQ ID NO: 24230 - DNA, 164 bp, Glycine max
  Clone ID: 701101082H1
gcgttccttcataaactacgttaaccatccctattcttcattactctcatgttcttcgtgactcacacatcagtttgaatcccgcattctataatcttctttcattgaaaccgctaaactaaaagtatttttttctcttcttttaaaaccttccacacaacata

SEQ ID NO: 24231 - DNA, 258 bp, Glycine max
  Clone ID: 701101084H1
ttatggtggatacctaggcacccagagacgaggtgtgggcagctcgttacatcttggagaggatcactgagattgctggtgtggtggtttcctttgatcccaagccaattcagggtgattggactggtgctggtgctcacacaaactacagcactaagtccatgagaaatgatggtggctatgaagtgatcaaaaccgccattgagaagttggggaagagacacaaggagcacattgctgcttatggagaaggcaacg

SEQ ID NO: 24232 - DNA, 252 bp, Glycine max
  Clone ID: 701101086H1
ttacactatgtctcttccaattcctagcaggttcgtattcaacgacattcacgattgtgaacaagtgcagctacacagtttggcccggcattttatccggcgccggaacctcgccgctccccaccaccggcttcgtattacaaccaggcgagtccaacgtgatcgccgtgccggccgcctggtccggccgcctctgggggcggaccttctgcacccaagatgccacaggaaaattctcctgcgtcaccggcg

SEQ ID NO: 24233 - DNA, 266 bp, Glycine max
  Clone ID: 701101088H1
cagaaacgttcactctccaaaaaggagagtgaacccttcaagatataacacacacaaaaagaaccagctaatagggaactgcatcgacactatggcactagatgacatatatacacaagatgggaccattaccatctccaaaaaacctgccaacaagacaaagactcggaaattggaaagcttgctattttattcttggaaatgaatgttctgagagattggcatactatggtatgagtacaaacctggtgaactatcttcgggag

SEQ ID NO: 24234 - DNA, 257 bp, Glycine max
  Clone ID: 701101089H1
cttaaggcgaagaagaacaatggttctaaacaaatttgtgggaacataattctgagttcaaaagaagtggtgtgcaatgctgaaagttgtcacagtgcagatgagaaacaaatttcagacaatagtgagctgaagaaaactaatgatgcgccacctaaagggaagagtgaggaggctgaaaataaaatgaaagacagccaaaatatgagcactggtgacaaaagtcctaatgaagagtcagacggtaaccagctgaa

SEQ ID NO: 24235 - DNA, 253 bp, Glycine max
  Clone ID: 701101090H1
atcatgagttgttgaagaatattgatgatggtgatgatgattatgttggtgaggtgatggagccagaggttgccatgagatctgttagctccttgaaggctagggatgcaattgcgcataaccttttgcaccatggactagctggaacttcttttgtttgattggaattgaaaactgaagattaagataatgtataattaattcttttgcttgtttttagttctagacatatgatgatggtatttaatcaagg

SEQ ID NO: 24236 - DNA, 259 bp, Glycine max
  Clone ID: 701101091H1
gtttctcgtggcagtgcaaaggcaagagacggccaccgtagaagacgcgcaagccatcatcgacagcttcaggcatttccctcgcagaggcgctggcctcaatctcgaaactttcttcaagtacctcttcagtgacgataacccccctcttcttccttctcatggggtgcatcatgatatgactttacccttgtcacattatttcatatatacaggccataattcctatttaactgggaatcagctgagcagcgactgc

SEQ ID NO: 24237 - DNA, 248 bp, Glycine max
  Clone ID: 701101092H1
ctcgagccgcttttcaaatattgcatattgcttgtggctaatcacacacttttccatgaactttgctgcttttgattttgatcacaacaacacaacgccaacgccgttctctgcttttgaacatcagatattatgaagtcaccttctcgagctttttctggtgctgatacaacgagtagaaaatcatgtctttatgccatcttcccagcagcttctttaatttgtgctgttttatttttcatgacctc

SEQ ID NO: 24238 - DNA, 250 bp, Glycine max
  Clone ID: 701101093H1
caaccctttcaagccggcctaaaccccattacccaaaatctgtttttttttttttattttttttcctgcaacactctttattggatcatcttgtatttcattccccctttacaatttcctttcaaaaaaaattttaaaaaatattaaaaagggctcttttttgtgaattttgacccatttggccaccgacagatttcgatcttctccgtgccaaagttgtaatcttttcgacttttggcgaggtgggccg

SEQ ID NO: 24239 - DNA, 256 bp, Glycine max
  Clone ID: 701101094H1
catctccttctcaaactagtagtattattcttccattcataatgggtgttttcacattcgaggatgaaatcaactcccctgtggctcctgctactctttacaaggccctagttacagatgccgacaacgtcatcccaaaggctcttgattccttcaagagtgttgaaaacgttgagggaaatggtggcccaggaaccatcaagaagatcactttccttgaggatggagaaaccaagtttgtgctgcacaaaataga

SEQ ID NO: 24240 - DNA, 160 bp, Glycine max
  Clone ID: 701101101H1
atttgtcttcaaaaggagcgacatgggatgagattgactttgaattcttgggcaatttgagcggcgacccatacatccttcacaccaacgtgtttagccaaggcaagggaaatagggagcaacaattctacctctggtttgacccaactgcagattttca

SEQ ID NO: 24241 - DNA, 77 bp, Glycine max
  Clone ID: 701101105H1
agcagccacacctcccgcagcagccatggatctcaaaactgatctatgacgaatcagtggagccaagatctacccag

SEQ ID NO: 24242 - DNA, 156 bp, Glycine max
  Clone ID: 701101108H1
cctaaacgccgtcgacgccgtggctggaagaatatggcttcatttgtttctacccactgtatccttcctagcggggttggatttgtccatgaccaagatcgttcttgtggtagaactaacactttgcatcttcaaaatgctcctaaaagccctagc

SEQ ID NO: 24243 - DNA, 156 bp, Glycine max
  Clone ID: 701101109H1
tgcatttcacgctttggctgaaggacttgcattgggagtggctgcaccaaaagcatacggacttggtcgtcatatggtccttccagtctctctacacgggcttccccgaggtgcagccgtggatagctgcatatttggagccactgatagctggct

SEQ ID NO: 24244 - DNA, 240 bp, Glycine max
  Clone ID: 701101066H1
attcggaaggattcccttgtttgtgttggtgttaaaaggcagaattactgtgaaagtagtagctgttttgatgctgggcggacatctgttgtaccttcagaagattcattcacatcaaaacttgaccataattctaacaaaaccccatgtccaaagggtgcatcagattataccttgggtaaaggtgtcacaggtttctcattggatgcgtctgatctaaccaagcttctcacaatggac

SEQ ID NO: 24245 - DNA, 145 bp, Glycine max
  Clone ID: 701101033H1
aagagtccatgctctctgctgataaattatgctactgggtgcatatttgagtatgatgcagctcatccagagggttctggcattggctttaaggaggaagacagacccaacttctttagttctttctattccaaaactaacgcta

SEQ ID NO: 24246 - DNA, 255 bp, Glycine max
  Clone ID: 701101035H1
atcactagtagtgttggatgtatttctatttctaactaattattgtgcttattattattgttgagaaagaaaagaatggcaaagttaataaaattctttgagttgaacacaggggccaagattccttctgttgggttaggcacttggcaagctgaacctggtgttgtagccaaagctgtcaccaagcccttctggttggatacaggcatattgattgtgctcaagcgtataacaatcaagcagagattggttctg

SEQ ID NO: 24247 - DNA, 264 bp, Glycine max
  Clone ID: 701101036H1
ctctactactgctagctgtgacttgttttgagttcaatcaaatcgcattggtatctgaaatcaggaaagatggttagcgtagctgagatcaggcaggcacaaagggcagaaggcccagcaaccatccttgccattggaactgcaaacccaccaaaccgtgttgatcagagcacctatcctgattactacttcagaatcaccaacagtgaccacatgaccgagctcaaagagaaatttcagcgcatgtgtgacaagtctatgatc

SEQ ID NO: 24248 - DNA, 237 bp, Glycine max
  Clone ID: 701101037H1
ccacgatgcaaggtgttatcttcaccaccctgacgggatagcaaatctttcatgcaattgagaattgctgctgctaatagagaagcttccattaagatgggggacttcaccgggagtggtgaatatgtgactcacggtgaattaccttcctccaggccaaatcattcaaggaaagttacagttcttcctcttgtgtttctcatcttctatgcggcttcaggggggcctttcggggtg

SEQ ID NO: 24249 - DNA, 263 bp, Glycine max
  Clone ID: 701101038H1
tatgcctgcaatatatagcttggaggaataaattctctgttggcaatagagcattctgggcatcttcccctgattaaagataccccaacgatgattttggggatggatgtctctcacaattcacttggtcgattagatagtccatcaatagcagctgtaagactagtttggttttgtatttcttgtacctctatatttttggatttttggttatctctgcagcatatcgttctgttgcctaatgttggattgtaggttgttgg

SEQ ID NO: 24250 - DNA, 269 bp, Glycine max
  Clone ID: 701101039H1
gtattatcgtcggaagcggtatccatcaatgtttctttctgataaacttgcaccacacttcaattccacactctttactcatctccacacccaccaggtaccgtcacttcaaattttcagccacatttcacaatcttctctgcattttccttccaaatttatgatctgtttcgttttctgctatctgggtatgtctcaagtttgagttagagtgcttccctcgcttctccaagacaagggttggtaaacttttcatgccatggtatttc

SEQ ID NO: 24251 - DNA, 282 bp, Glycine max
  unsure at all n locations
  Clone ID: 701101040H1
ccctcgagccgagttcggctcgagcactaattccactcagccatcgagatcttcaagacatccaagagtcggcccaaccctccactcacgtcccgtaancacgtccccgatcgcacggccgttcgccgccgagaacttttccacgatcaacaccgaccgtcgctacttttccggcgactcgtcgatggcgttggaaccgttaaagacactcccgaacaccgtcagaacatgcacaatacgaggcagagaatattgctgctggtgaacgatagttccgctaag

SEQ ID NO: 24252 - DNA, 265 bp, Glycine max
  Clone ID: 701101041H1
ttatcaacagcacaaagcgggttactgtctgttcaagctaccatctctctctctctttcttagtgcctccttgccaggtgctgccactctctctttctctctcttcatccttctgttgggttggttgtggagtgttgttttctgttgtgcacgtgttgtcattttttaccctcgccacagatctgaagtgttcaagtttggattttgtgcttctggacgttaacatggcccaagaacatttcctattcacatctgaatcagtgaa

SEQ ID NO: 24253 - DNA, 260 bp, Glycine max
  Clone ID: 701101042H1
ctttctctaacacttcacaatctctgtttcagctttctctcttttctacaatggcttgcaccaccgtcgtgttgacgctagtcgccgcattgttggtaacctccgtcgtggctcagtctccggcgtcctcaccagctctgtctccaaagcgcacccccgtcgccacacctcagaagtctccctcgccggcgatttctccctccgccgtgtcgccgtcgtcctctcctcccgctccggtggtgcacactccgtctccgtca

SEQ ID NO: 24254 - DNA, 255 bp, Glycine max
  Clone ID: 701101043H1
gagagagctagacactgagcgaaattcgcaaaccctaatttcggaaagatcggcgatggctgcctccaaggatcgcgagaacttcgtctacatcgccaagctacgccgaacaggccgagcgatacgaagagatggtggaatcaatgaagaacgttgcgaatctcgacgttgaactgactgtggaggagcggaatttactttctgttgggtacaagaatgtgattggtgctcggagagcatcgtggaggatcctgt

SEQ ID NO: 24255 - DNA, 262 bp, Glycine max
  Clone ID: 701101044H1
ctcgagcgcgaagaaatagaacaaaaaaatgttgcagcttctgtacgcggtgatattcggggaaatgttcgtgatcgcaagcttcctcttcaaaactccggcgaggaagctggtcatcatcacattggatcgggtcaagcgcggtcgcggccccgtcgtcgtcaagaccgtcgccgccacgctgctggtggttctcgcttcctcgctctacagcatcgccaagatccggcgtcggacacctcgacgctcccgtcgttaaccc

SEQ ID NO: 24256 - DNA, 259 bp, Glycine max
  Clone ID: 701101046H1
ctcgcgcagcatcatcaccgccgacaacctccgcatcgcgcgaccgtcataccccgtctcctccacgacgcgcaccaccaccactcaccaaataccagaaccacggcgcacagccccactccggccagatccacgtgggacctcctcaacgcgcacaccccaccccggtccgatctgaccccaacgccactctcggctccagccccgcgactaccgcaaaaccacccttgcacctccgtcctctccgccgcgcgtcctc

SEQ ID NO: 24257 - DNA, 264 bp, Glycine max
  Clone ID: 701101047H1
gaaatttattacatgttgaaggctcggggagcgaaagtgccgaaaaccaggaagactccaatgactgttgcaaatcctcgtgaagttccggaatatgaactcaacccgttagagctacaggttcggaagagtgatggtatttcaaagggaacataccaagtagctaaatggaatggcaccaaggttgcagtgaagatacttgataaggacagttattcagatcctgataccataaatgctttcaaacatgaactcacattatta

SEQ ID NO: 24258 - DNA, 257 bp, Glycine max
  Clone ID: 701101048H1
ctcgagcggtttgcttaagatgagaaaaagcaaccacttgatcggtctcttaaacttcctaacattcctgctgtcgattccgatcctaggaggcgggatatggctgagcagcagggcgaacaacaccgactgcctcaagttcctgcagtggccgctcatcatcatcggcgtcagatcatggtcgtgtccctggcggggttcgccggcgcgtgttaccgcaacaccttcctcatgcggctctacctcgtcgtcatgtt

SEQ ID NO: 24259 - DNA, 260 bp, Glycine max
  Clone ID: 701101051H1
atgcgaaaagacattatgctcatgtggactgacctggacacgcagattatgttaaaaatatgattacaggagctgcccagatggatggaggtatacttgttgtatccgcacctgatggacctatgcctcaaaccaaggagcacattcttcttgctcgccaagttggtgtgccatctctggtgtgttttctaaataaagttgatgcagttgatgatccagagttgttagagcttgtagaaatggagctccgtgagcttctg

SEQ ID NO: 24260 - DNA, 263 bp, Glycine max
  Clone ID: 701101053H1
cacatagcactcagcaataagacggtccctattgtgcctttacttcacggtggcggcttttgcttcggttcgcgcacctggccccatattcacaactgttgcatgcgcctcgcgtcggggctccaagcggcggtggtttcgccggactaccgtctcgcgccggagcaccgtcttcctgctgcggtggacgacgccgtggaggcggtgaggtggctccagaggcacggcctgagcttgagggaggccgcgtggttgagtggggg

SEQ ID NO: 24261 - DNA, 249 bp, Glycine max
  Clone ID: 701101054H1
gcgaagggaaagggttaggcatcattcatacactgaacgaacgctcagctcagtcaggtgccggcgctcctctttcacgttctcatggaaaacgacgacgtcgacatgcacgcgcgccgacaccagcgaagaaccggatgacatgaagaagcgcttgaaggagcatggaagatgaagctgctgctttgcgagagatgcaggccaaggtcgagaaggaaatgggatctgcgcaagatcctgcaaatgctt

SEQ ID NO: 24262 - DNA, 265 bp, Glycine max
  Clone ID: 701101055H1
ggaggatgctgaagagaagaaagaaaagaagaaaaaggaaaagaaagacaaggatgacaaaactgatgtagagaaggtcaaggggaaagaagacaaagagaagaagaaaaaggaaaagaaagtcaaggatgacaaaactgatgctgagaaggtcaaggggaaagaagatgatggggaggacaatgaagagaaggaggaaaagacaaaaaagaaaaagaaggaaaaggatgacaaaattgatgtagagaaggtcaaggggaaagaa

SEQ ID NO: 24263 - DNA, 264 bp, Glycine max
  Clone ID: 701101057H1
actcggaatctttcactccaccgctctaacccctaattccgatcaacgcttttgccttcgtcgctcgccagtttgttagcgggagctcagttattctgttttattgacgaagtgataacaaatggatgattgggaggatgagcatattgcccctattgatcttacattgaaagatccagttaaaagtaattgggatgatgacgatgtggatgccaatgatgtgcaggaatcatgggaggatgcagacgagcctgctccggcacc

SEQ ID NO: 24264 - DNA, 247 bp, Glycine max
  Clone ID: 701101058H1
ctcagctttgctgagtactaggctcagcaaggacttgcagtcaccagatcagcagccaaatacggtggatataaactcggcaatttataatgttggaccacctgtgccaacaagagttccaaaaatgcttagttttgtggacacaccggccatggttaggggtcctgaggacctaccagggtattgggtggtgactggggcacactgtgtgtcgagggtggtagaatctcaatcacggcaaagtctt

SEQ ID NO: 24265 - DNA, 253 bp, Glycine max
  Clone ID: 701101059H1
tatcaaagagagagagagagagatgactgagttgcaaaggttcgtaacatcattcagaagacaagggtcttcgggattggtgtgggatgacaaattcatcgctgggattgagaatgaaaacaaacaagagagtggtgatggatcaagagccacgttgcagcgaccttatcggacggtcaacgttgcaccacaagccatggaccctccttctcccaagctagcaacttgtggcttctgtgctctctttcggaaa

SEQ ID NO: 24266 - DNA, 259 bp, Glycine max
  Clone ID: 701101061H1
cgagggcaaggagtaccctggaagcctcactctatttgtgacggtaacatgtatagttgcagccatgggtggtttactcttcggttacgatatcggaatttcaggtggagtgacgtccatggatccgtttctgctcaagttttttccgtcagtagttcggaagacaaactccgacaaaacggtgaaccagtactgccaatacgacagacagacactgccgatgttcacgtcgtccttgtaccggccgctttgctgtcgt

SEQ ID NO: 24267 - DNA, 252 bp, Glycine max
  Clone ID: 701101063H1
tgcggtcatcgataccaccaagtatgggcaggttcatgcccgggtacgcaaagcacgtgttgggcccaatgctgaagtttctgagggagacgagaacacccttgatggtgaacccgtacccgtacttcggttacaacgggaaaaacgtgaactttcttctgttcaggcccaaccgaggcttgtacgacaggtccccgaagaggagttacacgaaccagttcgacgctctaatggacgcggtgcactcggcga

SEQ ID NO: 24268 - DNA, 263 bp, Glycine max
  Clone ID: 701101065H1
gaaaaagttagggtttgtaactttgtcttttgcttgcgaatctgaatcgaataataatcaatcaatcatcatgtcgtcggcgaagaacatcacactgaagagttcggacggcgaggctttcgaggtggacgaggcggtggcgctggactaccagacgataaagcacatgatcgaggacgactgcgccgacagcggcatccctctgccgaacgtgacgagcaagatcctggcgaaggtgatcgagtactgcaagaagcacgtcg

SEQ ID NO: 24269 - DNA, 257 bp, Glycine max
  Clone ID: 701101032H1
attccaaacccagaaagaaacgctgcctagaagacacattttcgctattttccgcctttcagagtctctcgtctctctcgggtcatccatcgtacgctaatggccgccataatttcgcgaaggttcaggttatccaccttagcctcctcactcctaaaaccctcttcttattctataaccaatttcatctccaacaaccctaaacccccaatcttcaaaccctcccaatgtcttccacccatcaggtttctctcaac

SEQ ID NO: 24270 - DNA, 283 bp, Glycine max
  Clone ID: 701100993H1
agactcccttacccaagcagatcttttgagctcgctcattgttctcgttgtcgaattgattggcttcaaagagatggaattctacttcttgaactagaccggttgctcaggccaggaggttattttgcatactcatctcctgaagcatatgctcaggatgaagaggatctaaggatatggaaagaaatgagtgaccttgtggggcgtatgtgttggaaaatagctgcaaagaggaaccaaactgttgtctggcaaaaacctccgacaaatgactgctatatgg

SEQ ID NO: 24271 - DNA, 284 bp, Glycine max
  Clone ID: 701100995H1
atatatcctctccaaaagcgatgaagagttattcacaccttacgttgacccctgttcatgaggaagctaagatagtaggaaaaacaagctatgccagcaacttgtctgggtatgatgaatatgttccaatggtagacatacctgttgatgctggttggaagaagcaagcatctctacagaggtcttacacctctaaaggagcacctcctcctgacactcagaaaactcctgaagggattcaagctcggatgtgggtagcactgtctatcttcttcttgactgta

SEQ ID NO: 24272 - DNA, 285 bp, Glycine max
  Clone ID: 701100996H1
ctcgagccgttccaaacaaaaacgtatgtcttggtcggtttttctccggagtcgtcttcacttttctccgagtttttattatcatcatctctctcgtgtccctgtctccatctccatctcttagtttcttcttcaaatggcagaagttgaagacatagacaaccctcatcacgaccaccatcattacctttcttcttctacaacacaacctccaatgatcaatttcccgcgagatctgttaagaaccttcgtgggagtgaacaacaacagcaataaaaacaataa

SEQ ID NO: 24273 - DNA, 190 bp, Glycine max
  Clone ID: 701101001H1
gaagaagaagaaggcgcgtggggcttggagagaggccagaggtagagcgcgtggagacgacggaagcctccgagggcgaggaccacggatcgtagctgttgctcaccgcaccctgtgtttgcccactgcttggtgcagatcagttcccatagcctctcgtcacgcgccgccttctgcacatgcttgctca

SEQ ID NO: 24274 - DNA, 268 bp, Glycine max
  Clone ID: 701101002H1
ggaagatctaacaagctctgtagcccagggtacctcagataatgatctttccatggatccagagggttcaaagtctagtaataaaaagagaaaagctttctcagataagccaacttcaaggccaatgaattcccaaaagatgagtgaatttagtactacgcctatggacgatgaattggatgttgttgatccagtgggtcagaaacccaagagacccatgaggataaagaagaatgtgaatgacaagtttgaagatgcttttactggg

SEQ ID NO: 24275 - DNA, 269 bp, Glycine max
  Clone ID: 701101004H1
cttcggttgatcccttctccgactataaaactgcaaatcccatcaaaatcctaatctttagggtttccatgtccaatccaagggattcgtttatgaagatttagcgaaaagggttgaaattgatcatggatttgggaagcgaatccgtggaagagaacgaagtacatcatgatgggaatggaaacggtggttcttatgatgacgagaagattgggttgggtttggagggaaatcggatgtcaacggttcgatcaaagggaaggttggcg

SEQ ID NO: 24276 - DNA, 134 bp, Glycine max
  Clone ID: 701101005H1
tttcatatatatgatatatccctttagaattattgaattagtgaaaacttgtgtaagtttgaatgttgagaatgataggacctttgctgctgttattgtctaatgcatgataaataaaatgtggtttttctgtc

SEQ ID NO: 24277 - DNA, 274 bp, Glycine max
  Clone ID: 701101006H1
cgagaaggagtggtacttttttagcccaagagacaggaagtacccgaatggttcacgaccaaacagagtcgcgggttctgggtattggaaagcaactggaacagacaagatcatcaccactgaaggtagaaaagttggcataaaaaaagcacttgttttctacattggcaaagcacccaaaggctccaaaaccaattggatcatgcacgagtatcgccttctcgattcttcccgcaaacacaacctcggaaccgcaaagcttgatgattgggtt

SEQ ID NO: 24278 - DNA, 271 bp, Glycine max
  Clone ID: 701101007H1
gtggtatgctccaggcattgatgaatctgttctcgctgtgttggaagccatttggccgcgatgctgctgatcgaatcgattccatcggagttaccggaagagaaggcaaagacggcttgctttggttccgcgacggcggaaaatatggctctggcgatttctccatggccgtcgttcaggccaaccaggttctcgaagaccagagccagatcgagtctggtcctctcggcaccttcgtcggcatctacgacggtcacggaggacccgacgc

SEQ ID NO: 24279 - DNA, 80 bp, Glycine max
  Clone ID: 701101008H1
ctagaactcacaaaggacagaagaaacgcgaatgccaggagaactccaattaccacccgggttcagattccacacaacat

SEQ ID NO: 24280 - DNA, 270 bp, Glycine max
  Clone ID: 701101009H1
ggggggagttccatcaggcaacaacggttctgcctgaccctacttaagcatgcatattatgtcagtgaagacttggtgtgaagccttggagcttacgttagaagagcaaaaggcccggggctagggtgagctgaggggggacagcgtaagtgagcgaatgtgtgtaagcccagtcaaacatgactgttctaggcggggcgggccacccaccttcgaatggtgttggtcctacggaccgtgaatggattcgcctctggcctctgggcacgt

SEQ ID NO: 24281 - DNA, 273 bp, Glycine max
  Clone ID: 701101010H1
atcattccattcacattctcaacccaacacacaacttccaaccatattctctcgccacttcctcacatggacgcaaagagaaccctagagctcacggttttatcgttggaggagctccacgtggactggaagcacgccgcggagagcctctacgtggtggtacgggcagagtccatcaccagctactccacgggcacggccaccgaaagcggtggcaacccgtcgtggaacgagaagctggtagttgacgtgcccgtgcatgcgaggtccatc

SEQ ID NO: 24282 - DNA, 268 bp, Glycine max
  Clone ID: 701101011H1
gttggcctgggtctctctcagacgatcaagtgttggagaaaagcgcgttgtatcagagagccactatgggaaatttgaaggacgtgtgggtggtgggaaactcgggacaccctctgatggagggtgttttggttccttacactcatcagtactctacttggacgcagcacgcgtttaatcagaaggttggggcgattcagagcattgctaaggacgctttcgccaggctcaaagggaggtggtcttgcttgcagaagaggactgaagt

SEQ ID NO: 24283 - DNA, 268 bp, Glycine max
  Clone ID: 701101012H1
accaacccaatttcaccgttgctagctcttgtatcttcttttgtcggagaaaataataataacaatatataatgtcggttgaggagatgcagtcacagaagaggaatgtgtttgacgcagaaacggcgtcgtccttggtgaaggagctgagggacaacttcggttcgggaaggactcggagttatgaatggagagtgtcacaagtgaaggctctgttgaaggcggtggttgataacgaggaacagatcgtcgacgctcttcgttccga

SEQ ID NO: 24284 - DNA, 257 bp, Glycine max
  Clone ID: 701101013H1
catggatggggtaacagtagaagaggcacttaatggtcagagattattcatattagcctatcaagacgcattcatgccatatttgacaaggataaacgcactaccttctgcaaaggcttatgccacaaggacaatcctgctcttgaacgatgatgggactttgaagccacttgctatcgaattgagcaagccacatccacgtggagataatttgggcgccgagagcaaagtggtcttgcctgcagaccaccgtgttg

SEQ ID NO: 24285 - DNA, 218 bp, Glycine max
  Clone ID: 701101015H1
cggtgcggggtattctctcggacttgacttgtgacagcgacgggaagattgacaagttcatcaacggagagtccagcctgccgcttcatgagatggacggaggacgcacttactatctgggaatgtttttgggtggggcttacgaggaggcgctcggtggagtccacaacttgttcggcggacccagcgtggtccgggtgtcgcagagcgatggccct

SEQ ID NO: 24286 - DNA, 268 bp, Glycine max
  Clone ID: 701101016H1
gagctatcttttatacgcaaggctaaagaatctggagttgtttatcttcttggtcacggggatataagagcaagaaaagactcatggtttatcaagaagctaattataaactatttttatgcctttctgagaaagaactgccgaagtgggatcacaaatttaagtgtaccccattcacatatgatgcaggttggcatgacctacatggtttgaccatgaattttccaacccaaacaattgacaggtaatatggaattatagtttggta

SEQ ID NO: 24287 - DNA, 267 bp, Glycine max
  Clone ID: 701101017H1
ctcgagcgaatcggctcgagacctcaccaaaggaactaagaacttcattgaggctagagaaagtggtgatcaatatatcaaagaatccaaaagttttctttgatattctaattggaaagatgaaagctggacgagtagtgatggagttgtttgccgatgcaaccccaaaaacagctgaaaacttcagggctctctgcactggggaaaaggggattggacgatctgggcaacctttacactacaaaggttctgtatttcatcgtatta

SEQ ID NO: 24288 - DNA, 269 bp, Glycine max
  Clone ID: 701101018H1
atccgctcaaatgttttttctttccatcatcatcatcatcatcatcattcagaatcgctttccatgcttcccatagccttcaaccctcttggtctcttcttgttacttttcttctccctaacttcatatctttcttggcacatatcagacaaccacgccccaggactcaccaaaagtaagcttctttggatgattttggctctctttttgggtcgctgaggaagcttacaacccttcatggcgagaacgtctcgctctttctccttgct

SEQ ID NO: 24289 - DNA, 267 bp, Glycine max
  Clone ID: 701101023H1
caaaatggtttcagttgagagaataaagcagttctccagccttccctcagaagctccatggaaaattgctgacaaaactcctcctcagaattggcccagtcaaggcattattgagttaaccaatttgcaggttcggtatcgaccaaatactcctctggttctcaagggaatctctctcaccattgaagcaggagaaaagattggtgttgttggtcgtacaggaagtgggaaatcaaccctcattcaggtgttatttaggttgattga

SEQ ID NO: 24290 - DNA, 267 bp, Glycine max
  Clone ID: 701101025H1
cctcccccttcttcgctcccacccttcgttgacctcctattctcccctcatcggagctcaaatctccgatcccttcatccatatcgcttcaccgcaactttctcttcatccatcgcaagatctagttgaatctcaaccgcgctcctccgattcgaagctccactcactcactatctcttcagatctggggggtttgattgcgattctcactctgctgctcggatttgttcgtctgagatgtcgattttaccgaaaggcgattcggtt

SEQ ID NO: 24291 - DNA, 98 bp, Glycine max
  Clone ID: 701101026H1
atcccaccccacgctccctcaaaacaaaaagaagggtttcaaatttcaattcataactcaccaatcccatagcgtcgccgtttctacaccgtccgatt

SEQ ID NO: 24292 - DNA, 266 bp, Glycine max
  Clone ID: 701101028H1
ccaccacaacaacaacttcatcaagattccttcatcacctccaactgtgggagagtaagtaggaaaagggttttctttgagggcactgattctcccacacagaacaagttccaaaggattgtactccactgacaactactactaaactgttactaaagtcagttttatttatctatttttagttttttaatttatactatgatttaacaacggttcggacgcgtagcacggtggtgtttgattcgactgatctagtgtttaatgta

SEQ ID NO: 24293 - DNA, 255 bp, Glycine max
  Clone ID: 701101030H1
gcaaatgattgacatacttctgaatttgcagctgttagctcctttcttccttttcttcatctttccagtgtttttacttctctttctcacgtcctcatgtcctactaaacgaagcatcactatcccaaaaccatacccactgattggtcactacttagacctcaaaggcatcggcaaccgccgtatccagtggctatccgacatcgtcaaaatctcaccggctaccacgttcaccctccaccgccccttaggccg

SEQ ID NO: 24294 - DNA, 157 bp, Glycine max
  Clone ID: 701101031H1
attcaacaacagctcagcagtggtagtacccatgagcctgcagaatctgcactttttttgccttggcttctattctctcctcactttgaatcggaagatatcctttccattcaaggcagcaagcagaagtttcaacgaaagtctcctcttccacaca

SEQ ID NO: 24295 - DNA, 284 bp, Glycine max
  Clone ID: 701100992H1
gacattgtaactagtgatggggaacatgtcgatatgcttgaacaaattggactaaccaacattaaggcctctccactccaagtcattcttacaccacgtctttctggtcatatttatgatgaaatttaaatactaaaaaaataagataacatgtcatgcatggataaattaggaatgcttggcttttatcgttttgaataaattacgaatgctaagattttattatttaaataaaataggaatataaaacctgggattaaggaaaagattagtcaaatcctgag

SEQ ID NO: 24296 - DNA, 284 bp, Glycine max
  Clone ID: 701100964H1
aacacagtttgcttatctggctaccttttgcactatgtcctgactcatactcaaattcaaggtgcctatgttacttatcttggagtttctcttgcctgcatgctggtgtttttcattggtttgggaagaatttatcttggcatgcatagtgtggttgatgttcttgctggccttcttattggactcgttgtccttgcattttggcttacggttgatgaatacatggacagttttgtgatctcaggacaaaatgttacgtccttttgggctgccttgagctttct

SEQ ID NO: 24297 - DNA, 148 bp, Glycine max
  Clone ID: 701100965H1
atctatgctattaagaggtggaacgaaagcaccaagtacttcctgcaggataattggcagagaacttgggtattgctactgtggattggcgtgaagttaggtctatttgcctacaaatttgtgcagtatagaagacaacctgcatatg

SEQ ID NO: 24298 - DNA, 283 bp, Glycine max
  Clone ID: 701100966H1
cggaatgttgtttcaggtgatgaagtttgaggatctaaaggcacttggtagtgagtcagctgtgaaggtatgaatttattcttttgatgcaacgtattgctgttgcttcctaaaatgttgtcacagtgaccagcatcagattgataactgggtgataaaacggagaaaaatagcccatatttttctagaatttgctggaaaagtgaggaaagatcctcactcacctgggtaagtcgagatagaaattcaggtctaataccttaggttaatttggctaaaatat

SEQ ID NO: 24299 - DNA, 280 bp, Glycine max
  Clone ID: 701100967H1
gacgaaaggaaagaagaagaagaagcgttctttcggagagttcgaagatgtcgggcgttaccaacaacaacgaggaagacaagaagccaaccgaacagggagcacacatcaaccttaaggttaaggggcaggatgggaatgaagtttttttcaggatcaagagaagcactcaattgaagaagcttatgaatgcttactgtgaccgacagtcggtggatttcaactccattgcttttctgtttgatggacgccgcctccgagctgagcagactccagatga

SEQ ID NO: 24300 - DNA, 285 bp, Glycine max
  Clone ID: 701100968H1
ctcaataatgatctatttgcattgtttcgggcgttaccctttttttttatatttattttgtaaagggaacaatttttgcaagtgaaacttgttttttcatttgaggattttgtttagtatacctgctgtgcttatggacggtcttgtactgattcgttatgtcatcagcacaaaacataaacctaagctacatctaatgttgccaccatgaattttttgtgtgttccaattcatatgggaataacacttctgcattgtggcaaaagttataattactttctaata

SEQ ID NO: 24301 - DNA, 288 bp, Glycine max
  Clone ID: 701100969H1
cttcgaactgttggaaatattgtcactggagatgatatgcagacacaggttatcatcaatcaccaggctcttccttgccttctgaatctgttgaccaataattataaaaaaagcatcaagaaggaagcttgttggaccatatcaaacatcacagctggtaataaacagcagattcaggctgtgattgaggctaatctaattgctcctttggtcaatctgcttcaaaatgctgagtttgatatcaagaaagaagctgcttgggctatctcaaatgctacatccggtggt

SEQ ID NO: 24302 - DNA, 286 bp, Glycine max
  Clone ID: 701100970H1
acaaatattaggttggttgcaccagagtctggtaattatgatcataaactcccaataggcaaggccatagaaacaaagcgattcgatatctgtcagcctacgtcacatatgggatttgagaaattctcttttgttccctccgatgctcattcggtttcaggtcaagcacacggaagaaatccagttgtggagtctcttccccaaagcaaagatctaaaggatgtcaatgaattgggtttatgttgctcaagaagtacagatgatcagtcagtgatgcctgggataa

SEQ ID NO: 24303 - DNA, 282 bp, Glycine max
  Clone ID: 701100971H1
cttgtatatgagcctccaagggatggtcccacattgtgggaaattagtattcctgatagatccgctgcagaattttatgctcctgatcccagtccacaacatattaataagctttttatcaaccatccagacaggttcaggcagtatggattgtgggataggtattcagaattgtatcctgatgcagatttggtttacacaattggtgttagtgactatacgaaggattggttttatgcacaggctccgaggaaaaaagtggataacactcttcaaggaaca

SEQ ID NO: 24304 - DNA, 287 bp, Glycine max
  Clone ID: 701100973H1
tttaggttgggatttgggaattagggttattcgcgtggcgaagatgattgaggtggttttgaacgatcgattggggaagaaggtgcgcgtgaagtgcaacgacgatgataccatcggcgacctgaagaagcttgtggcggctcagactggcacaagagccgacaagatccgcatccagaagtggtacaccatctacaaggatcacatcactctcaaggattacgagatccatgacggcatgggtctcgaactctactacaactaaacacaacaaggtgtgttttatg

SEQ ID NO: 24305 - DNA, 285 bp, Glycine max
  Clone ID: 701100976H1
ctcgagccgctcgagccgaatcggctctagtccgggtgatccctccgagaatgttcctcaatacccatccgtacacaacatcgcaacaaagccactcataaccactcactcatccctctctcctgtcaccgctaccgcatcactcgtcaagaagccgtcgtctcctgctacggatgcttgggcatcatttgcccacgcatccgtaacaacggagacggcggccctgaatttggaggacgcggacagctgttcgcgtcggtgtcgacgcgaaaattgctccagtcc

SEQ ID NO: 24306 - DNA, 285 bp, Glycine max
  Clone ID: 701100977H1
ttcacttcttcgctaatctctagattactcccattcattccattttgtttcattaattaaccaaataaaaaacgatgagcacttctcatcaacaacgttatctcctcttcgctttcactacgttaatagttttcttcagcttcaacactacaccagtctcagctcgtttgttccccaacgtttcctccatcccaaggtggaacacatcccacgcgccacctgatagcgcgtggaacgcgtatcgcaatttcactgggtgccgcccgggataaacatctaacggtc

SEQ ID NO: 24307 - DNA, 285 bp, Glycine max
  Clone ID: 701100979H1
cttcaaatcctttaattgccaaataccaaggttctcttctggccatgggactattggtatgttcgcgggcaccggtggaccaattggcatttagtttcctgatgttcaggaagttaaagatgaccaaacaaacccggacagatatgtagagaatcacaattatcaccaccaccaccatgacggccatcaccatcaatcttcaatactatactacttactacattacaaaatgcatacgtaaaaagcagttcagtaaaggaagtgggggcaggcattcgctttctt

SEQ ID NO: 24308 - DNA, 284 bp, Glycine max
  Clone ID: 701100980H1
gccgtggcaaagcttttgaatttagtgcctctcctctctgtttacccttccagatattgcagatacagcaagatcatgagtgggacttcggaaaagaaacttgtaagaatcgatgttagttctgatactgtatgcccatggtgctttgttggcaaaaaaaatctagacaaggccatagctgcctccaaggataaatacaactttgagataatatggcatccctttcaacttagccctgatgcccctaaagaaggcattgacaagagggagtattacagaagaaa

SEQ ID NO: 24309 - DNA, 282 bp, Glycine max
  Clone ID: 701100981H1
ctccatcccgatctctttattgtcttctttctctcttcctggttttcgttggagaatcctgaaaaccgcttgattttaatcaaagggtcatcaggattcgggcacccatatctcgtatcactccttctctcctctgttgtcttagaaagaagaccaagaaaagcatcaatttttgcaagcaatcttcttcttttgccctttctcttgtctctaacatacacacacaacaacccagctgctgaagctgaagcatcacaactcacacatgattcgagtggccac

SEQ ID NO: 24310 - DNA, 281 bp, Glycine max
  Clone ID: 701100983H1
atggcaaagcttcatgaggctgccagttctaacagtgtcgatgcatataaacaatatgccatagccagtcatgaattgaacaaggcttgcaatttgcgtgggcttcttaaatttaaagagacagcagttaagattcctattgatgaagtggagcctgctagtgaaatagttaaacggttttgcactggggccatgagttatgggtcaatatcattggaggcacacacagcattagcaatggctatgaataaaatgggagggaaatccaacacaggtgaggg

SEQ ID NO: 24311 - DNA, 281 bp, Glycine max
  Clone ID: 701100984H1
gccaaattgcacaacatataccgttgtcatcagcaaagataaaagaaatagttgagatgctttttgtgaacccagagccagagaatgttaagattctagaggaaaccattagtatgtgtgaagtgcctgcaataactggagaagaaagatattgtgcaacttcattagagtccatggtagattttgtcacttctaagcttgggaagaatgctcgagttatttctacaggagcaggtaaggatagtaagtcccaaaaattctcggtgaaagatggagtgaag

SEQ ID NO: 24312 - DNA, 285 bp, Glycine max
  Clone ID: 701100985H1
gtgaggtttggtggtgtggtttagtgtcaaaatggcggcgagtagaagcactttacctctgatgaagtacttgagagtgcgcgtggacgctcttccccgcaacactcccttgaccctcacttccaacttgttgattcgccgcttctccgaagaggttaggggttgttttctcgacaagtccgaggtcacagatcgcgtcatttcctgcgtcaaaaacttccagaaagtcgatccttctaaggttaaccctaatgctcacttccagaatgaccttggattggatag

SEQ ID NO: 24313 - DNA, 287 bp, Glycine max
  Clone ID: 701100987H1
cccttgccgactacaacatccaaaaggaatccactctccacctcgtgcttcgcctcaggggtggcatgcaaatctttgtcaagactttgactggcaagaccatcaccctcgaggtcgaatcctcggacaccattgataatgtcaaggccaagatccaggacaaggagggtatccctccagatcagcagaggttgatatttgctggtaaacaacttgaggatggaagaacccttgctgattacaatattcagaaggagtctaccttacacttggttcttcgtttaaga

SEQ ID NO: 24314 - DNA, 287 bp, Glycine max
  Clone ID: 701100988H1
atttggagtttggagcgactgaactaatcattaatttgcactcgctgtttcagcttcatcacccttcttttgcatcatttatatctcttgagaaatggcacaagaaacctttctattcacatctgaatctgtaaacgagggtcaccccgacaagctgttgtaccagatctctgatgcagtacttgatgcgtgccttgaacaggaccctgacagcaaggttgcctgtgagacatgcaccaagaccaacatggtcatggtcttcggagagatcacaaccaaggccaacg

SEQ ID NO: 24315 - DNA, 286 bp, Glycine max
  Clone ID: 701100989H1
ctgctggcgaagacaggagtgcatgtgcctgtgtttccaagcgctggcttatgcatctaagcagtatttgcaaaagtgaaatctctgttaacaaaaataccacagtagagaaccctgaaaaggagggtgatgatgtagaatttggaggtaagggatacctctctcgaagcttggaaggaaagaaggcaacagatgttagactggctgccatagctgttgggacttcatctcgaggaggattggggaagctctcaatccgtggaagcaacattgtttgtggggtgac

SEQ ID NO: 24316 - DNA, 284 bp, Glycine max
  unsure at all n locations
  Clone ID: 701100990H1
gggatgtttgaaagcaacccgagagtcttctcagcaagttggattattcaaagacattaacagagatatggtgaacaataatgtgagagctattcctgaaacttcttatacacataacagagacattttatctggtggcatttcgactcctattaagatcaatgaaaagaattcaagaggagcaaagggacacaaggttgtttctgatttagtcaagcctattgacgtggtntcctggatctgagcctgaaattcaggctcctccttttactgttagtaatgga

SEQ ID NO: 24317 - DNA, 283 bp, Glycine max
  Clone ID: 701100991H1
cgttactcacatggggggtgcacctacagtgttaaacatgataatcaattcatcacctaaagtccagaagccgcttccgggaaaggtccaagtgatgacaggtggtgcaccacctcctccggatgtgattttcaggatggaagaactaggatttaatgtgactcattcatatggtttgacagaaacttttggtccggcatcaatttgcacttggaaaccagaatgggacaatctgcctcaagatgcacaagcaaaactcaaggcacgtcaaggagtggcccat

SEQ ID NO: 24318 - DNA, 288 bp, Glycine max
  Clone ID: 701100963H1
gacacataaccctcacaaagaaagcaaaggcataccaagactacaacaactatgggtagcgatgcccctctgacgagtaccaagtgtacgacaccccagtagaggcaacatatcctaggcaaaatcatcacaagaagggtcatgtggcattcagaaccaactatgaggattctatagctgaagtagaatacaacgttgaggctcgagaacataacagcaggttatggaatcacagtgcttacaaaagcgtggaccaagaggctgaggcgtttattcagtatgagcata

SEQ ID NO: 24319 - DNA, 289 bp, Glycine max
  Clone ID: 701100937H1
ctgaaacggagtccctagcaaatgttacagagatacatgatggttcggatttttcatcaaatgatgatggaggatactcctttggaattttctgtgtgaaattctcaaaagatgggaaagaattagttgcaggaagtagtggtgattctatatatgtatacgatcttgaagcaaataagctctcacttcgaattttagctcacacgtgtgatgtgaacactgtatgttttgctgatgaaactacccactctatttactctgggagtgatgatagtttctgcaaggtctg

SEQ ID NO: 24320 - DNA, 290 bp, Glycine max
  Clone ID: 701100938H1
cggggagaatcctccgtcttgcgaaacagttaggaagggagtctttgctgccggtgctgcttttgttttcttcactgccataatctctgaattctactatatcaactactcaagggcaagggaaagcttccaaccttatgctggcggcgagactggtgtcggtatgggaacctacaaatgagcttctagttaagaattttacagcaaacatttaggtgtgactatatctggagtctggattctgcagcacatttccttgattttagtgcatttattgtatttactgtcta

SEQ ID NO: 24321 - DNA, 291 bp, Glycine max
  Clone ID: 701100940H1
gcacattccattgcagcagatccacaccttcgctttcatcatggccgaatttctggatctcgaatcccaagacggcgttcgaatgccgtggaacgtgatccccggcacgaagcaggacgcccaaaacgccgtcgtccccatctccgtcgtctacactccgataaagcacttcccctcgatgccggtcctcaactactcccctctccggtgccgcacgtgccgctccgtcctcaaccccttctgcatcgtcgacttcgccgtcaagatctggatctgccccttctgcttcca

SEQ ID NO: 24322 - DNA, 290 bp, Glycine max
  Clone ID: 701100941H1
tcctcgtctatgctgaaaaacgagaaggagatactcgattgccttggagcttccccttatgtcatcaaatgttcggccatgatcacactgttgaaaacggagaagagtattacaacattttcctcgaatacgccgccggtggttctctcgccgatcaggtcaaaagacacggcgggaggcttccggagtcttacgttcggaggtgtacgaggtcgatcgtcgaaggtctaaaacatattcacgacaacggttatgttcactgcgatgtgaagcttcaaaacattctcgtt

SEQ ID NO: 24323 - DNA, 285 bp, Glycine max
  Clone ID: 701100942H1
agaagaagattttaagaaggcttttaggatgggaagagaaacctttgacatgatctgtgaggagttgaattcagcaattgtgaaggaagacaccactttgaggaatgctattcctgtgaggcaaagggtggctgtgtgtttgtggcgattagccactggggaccctcttaggattgtttctaagaggtttggtttggggatatcaacttgtcacaagcttgttcttgaggtttgcaccgctattaagtctgtgcttatgccaaagtacttgaattggcctgatga

SEQ ID NO: 24324 - DNA, 288 bp, Glycine max
  Clone ID: 701100943H1
ctttgcaatctacacaatattcagtattcaccatgggagccacaacttttacacatgattattcatcccctgttgctccatcacgcatgttcaaggccttgatcactgactctagaactttgctgccaaagctcttaccacagatcaaaaaagaggtcaatctgatccaaggagatggggaagctggaagcattgagcaagttaactttgctgaagctttccccttcaagtatgtgaaacacaggattgatgaggttgataaggacaactttgtgtgcaaatacacta

SEQ ID NO: 24325 - DNA, 288 bp, Glycine max
  Clone ID: 701100944H1
ctcgagccgtgcctttgcacaacatacacgtactcctatcctagctacttactctcacttcactcaattcctcaactctctagctcttatggaaactcaacaccaacaacccaccatcaagtctaggttcagacgcatctgtgtctactgtggtagcagccctggcaaaaaccccagctaccagctcgctgctattcaactcggaaaacaactggtggagaggaacattgacttggtttatggaggaggaagcatagggttgatgggtctaatctcacaagttgtgta

SEQ ID NO: 24326 - DNA, 285 bp, Glycine max
  Clone ID: 701100945H1
ctagtatagttagagatatcactactacaccaccctgcatagtttgttcagctataatactacttgagcttctttacctacttttcaaacctacattgcacacaaaatggcaacatcttggtcatgttatctacttgcattgcttctttttatgtcaactattgtatcagagagtagagtggcaaggaaggacttgggcctggaccttggtgggttgggggttggacttggactgggtttgggcctggggataggaggtggcagtggctctggagctggtgccgg

SEQ ID NO: 24327 - DNA, 289 bp, Glycine max
  Clone ID: 701100946H1
ccagctcgacctctagcgctttgtcccacaaaagatggggttcactcccacaagtagtagcaacaccgcttgcttcccaataggacctctagttgtgctatggtgtcggaagctactaaagtgggtgtggctgaggccaaagagattggagagagcattaagggcacagggccttcaggggaatccctacagcctcttgattggggacactaaggacatgtacacagtgctcatgcaagctggcagatcatgatgatttcacattttgtcaggtcagtgcacctgttga

SEQ ID NO: 24328 - DNA, 286 bp, Glycine max
  Clone ID: 701100947H1
tacagagcactatacattctcaactggatctaccgctactttaccgagcctcactttgtccattggataacatggatttccggccttgttcaaacactactctatgctgatttcttctattactatttccaaagctggaagaacaacaaaaagcttcatttgccagcatgagtgtattcttctgttcttaaaaacaagggtctatgtggacaattaacagtgagcagagaggatccacaaatttgtctggacatagtggtttctgatttacaattgcctatttgtt

SEQ ID NO: 24329 - DNA, 287 bp, Glycine max
  Clone ID: 701100948H1
gagaaaggaaggaaaaatggagttgttcttctacgcggtgttcggcggtttgggagcggttgttgcagtgacggagctgagcaagagcaacaaggaccgaatcaacacctcttccgcattcaattccttcaagaacaactacctcatcgtctattccctcatgatggctggagattggctacaaggtccatatgtctactacctttacagtacatatggatatgggaagggagacataggacaactcttcattgctggttttgggtcttccatgctctttggaacaa

SEQ ID NO: 24330 - DNA, 288 bp, Glycine max
  Clone ID: 701100949H1
agcgccgcattactcctcaactgatctgggaaaataaggcgtctcttcttaccagctgctgctaatgtttttcctgcctgcaattttccatcttccctgcagaaatttccaaaacaaatagttgttggtgatttgtcaacatgaagaagttgttagattttgggaagaaagccctcttttatgttagggtgctttctggatatgaagagcgaagaatacgatcttataggctgcagcttgagcaacgtgtacaacaggcacaagcaaggagggcggccataaataaag

SEQ ID NO: 24331 - DNA, 285 bp, Glycine max
  Clone ID: 701100951H1
gaatggcaaagttaataaaattctttgagttgaacacaggggccaagattccttctgttgggttaggcacatggcaagctgagcctggtgttgtagccaaagctgtcaccacagccattctggttggatacaggcatattgattgtgctcaagcgtataacaatcaagcagagattggttctgctcttaagaagctttttgatgatggtgtggtgaagcgtgaggacttatggatcacctccaaactctggtgttcacatcatgcttcagaagatgtgcccaaag

SEQ ID NO: 24332 - DNA, 244 bp, Glycine max
  Clone ID: 701100952H1
cggctcgaggtttttaagttggacctgcacaatttccctatctataagagaagcaaagtatgtacaatatttgatctctatcataagagaagcaaagtagatacaatatttgttaggggtgttcatggtttgattaggttggattttttgttaaaaaatcatccaaatcaaacttaaaaaacttgtgatttggttcgattcagttttcatttaaaataaaattcaaatcagaccaagttaatat

SEQ ID NO: 24333 - DNA, 288 bp, Glycine max
  Clone ID: 701100953H1
cgttggtattgatattgatggttctttatgtggatgcacaattagaactacacatggtctaccttgtgcgtgtgaacttgctaagtatagtaggacgtggcacccaattcccttgcaagcaattcatgttcattggaggacattaaacttcagtgaccaagaaatgaacaatgaggggctcgagttagcgttgcaacgtgaagtggatgctttgcacaatcaatttcaggaacttgattatgctggaaaaattactttgaaggccaaattgcgtgaactagcatttcc

SEQ ID NO: 24334 - DNA, 288 bp, Glycine max
  Clone ID: 701100954H1
attacagagcattttccaacacgattacacgacagaatcaaacccctctttctctccgaagctgcttttaatatcgtactggccttcgattgttctcctctttaatacatactgttctctcttcgatttgagggaacagtacaagagtctgagcatcggttaacccaactgcacaggtagtctccaaataatggagcctcatgatgagactggatgccaggctcctgaacgccccattctttgcattaataattgtggcttctttggaagagcagctaccatgaacat

SEQ ID NO: 24335 - DNA, 292 bp, Glycine max
  Clone ID: 701100955H1
actcgagccgaatcggctcgagcaaacatacatagagaaattcactactataaaaatcatcaactcaaataaagctagacctacaaagatccagaggtagctacggagagaaacaaagctcatggctggtttgcaaagatctgaggtgtctttcaggagacagggttcatcagggcttgtttgggacgacaagttattatcaggggaattgaacaagaacgaagacccaaagggtgctcatggtggtgaccttaaccttaaccttaacgttagaacaacaccacccatccag

SEQ ID NO: 24336 - DNA, 191 bp, Glycine max
  Clone ID: 701100956H1
ccgcaagatggggtatggtgaaggctttcagtggctctctcagtacattaaatagagaacaagtgtttgctctttattatcctcatgctaatgtagtctccacattagcgtatctctgctcatgtaaattggatatactttaatggtggttttactttttctttgttatgaatgagacatactagtttcta

SEQ ID NO: 24337 - DNA, 290 bp, Glycine max
  Clone ID: 701100957H1
ctctccctcctcctcttcagagtagcattgttcattcacactccctctctggttttcattctttggcattgcgaaaaaacgaaaactcagaaaaccgcaacaaactcacactcactcacaagaagtagtaacaacatcaacaactctctcatcatcatggcagttgaggctcctccgcacaacatgaatctcttcccctcgcagttactaacctccagagaaacgatgaaaccgaatctcggcttctacaccgcgcagaaacggaaggcggcggtggcgccgcgccgcca

SEQ ID NO: 24338 - DNA, 282 bp, Glycine max
  Clone ID: 701100959H1
ttttctttaatcaaacgctctaccacttggtctaaatccttatcttagtttccttctgtgtgtctctaggagcatcatccttatctgtctgaggttgcatcagcaaaggtgtcttcgaaggttcaacaagatttcatcagcgagcacttattttactatttctcaaggtacatacagaaagtttgtttgagctaagtgagtaaaaggagaactatgtcattggttatatctgcagagttggctgatacatcatatggaaatgccaagctctacacactaaag

SEQ ID NO: 24339 - DNA, 298 bp, Glycine max
  unsure at all n locations
  Clone ID: 701100960H1
gaataggctctagcacacattgcagaacttactttcgcaatattaatatgttctacaaattggactaaccatcattaaggcctctccatctccaagtcattcttacaccacgtctttctggtcatatttatgatgaaatttaaaacctanaaaaataagataacatgtcatgcatggataaattaggaatgcttggcttttatcgttttgaataaattacgaatgctaagattttattatttaaataaaataggaatataaaacctgggattaaggaaaagattagtcaaatcctgag

SEQ ID NO: 24340 - DNA, 286 bp, Glycine max
  Clone ID: 701100961H1
ttttggtcccactgggctgacaactgaggttaagtctgttgagatgcaccatgaggctctcacagaggctcttccaggtgacaatgttggctttaatgtgaagaatgttgcagtcaaggatctcaagcgtggttttgttgcatccaactccaaggatgaccctgccaaggaagctgccaacttcacatctcaagtcattatcatgaaccaccctggccagattggaaatggatacgcaccggtgcttgattgccacacttctcacattgctgtcaagttttctgaa

SEQ ID NO: 24341 - DNA, 263 bp, Glycine max
  Clone ID: 701100936H1
gcaaaaggccatataattctctcttatttgaaataatgtccgggatcatccacaagattgaggagaatctcaatgtgggagggcacaagacagaggagcacaaaggagaacaccatggtgagcacaaaggtgaacacaaaggagaacaccatggtgagcacaaaggtgaacacaaaggagaacaacaccatggggagcacaaggagggacttgtggataagatcaaggacaagatccatggtgatggccatgacaagggtgag

SEQ ID NO: 24342 - DNA, 142 bp, Glycine max
  Clone ID: 701100911H1
agaaaccctctcgaatgactgagtcaatgcccgccgtggaaccgtcgccggagcctccggcgtccgatatcgtgttcgatgacttctccaccgacttcagcgccctccccatcccctccatggactcgctcttcaacacaac

SEQ ID NO: 24343 - DNA, 289 bp, Glycine max
  Clone ID: 701100912H1
aagaaagtcacgctggcggtgaagaacgtttctgcggcggccgaggaggaggaacacatgacgctgatttccgatgttgagaaccttgcggatgccgaaatccccgacaccgcacatcaaattagcaccgattcatggtttcaagtggggttcgtgctgacgacgggaatcaacagcgcgtatgtgcttggatattctgggaccatcatggttcccctgggttgggcagggggtgtggttggtttgattctcgccactgcaatatcgctctacgcgaatgctcttattg

SEQ ID NO: 24344 - DNA, 288 bp, Glycine max
  Clone ID: 701100913H1
ctttcctttttatccttagtataagagagactactagtttaggacgaaatttatggtttacttcggagaataattttaaaatatcatcgaacaagcagttagagttgtgaggcgcttttagccggagttgcttctctcatcgtcagttctcgttacgttggtcgaccgactgtgtgcagctgattttgcaaagagaagagggaattttgttaggatagttgaatactgataagagaaataacgggaaacaacagacatggatactggtggcaattctttaccatctgc

SEQ ID NO: 24345 - DNA, 288 bp, Glycine max
  Clone ID: 701100915H1
cttgctttgcctgcaccaccaatgcctggaatgggaggcccaggaggtatgggaggaggctttgctcctccccctccaatgggtggactggggatgcccccaatgcctccttatggcatgcctcccatgggcagcagtttttgacaagtttagcatgaacttggcccctgtgaagaccaatgtaggaacttcgaagttttgtgtagaagaatatcttgtgtgatttggatgcagcattcattctttgcttcgggtggcggtgggagatcccaatttccagtaatgtga

SEQ ID NO: 24346 - DNA, 291 bp, Glycine max
  Clone ID: 701100916H1
tgcagtgacaaacaacaagatcttttcaatgccatgggctccatgtatgctgctgttctccttattggcattaagaatgctaatgcagtgcagccagtggttgctgttgagcgaacagtcttttatagggaaaaagcagccggaatgtattcagctttaccgtatgcttttgctcaggcaagcaaatcctcattctaaaaatcttgtctttgtagtgttactatatcctcacaaatcatcatcgttgttggaaagtctcacattgtctgtctcaatttctggggtgtagct

SEQ ID NO: 24347 - DNA, 288 bp, Glycine max
  Clone ID: 701100917H1
cctctagctctcacacacactttctctctctctctctctcacccagatcttgtagcaatggcgagcgctcccactccacgcgaagagttcgtgtacatggcgaactggcggagaggccgagcgctacgaggagatggtggagttcatggagaaggtctccgcctccgccgagagcgaggagctgaccgtggaggagcgtaacctcctctccgtcgcctacaagaacgtgatcggcgctcgccgcgcctcctggcgcatcatctcctcaatcgagcagaaggaggagag

SEQ ID NO: 24348 - DNA, 290 bp, Glycine max
  Clone ID: 701100918H1
tctccattctccaaaactgcttcaactcttctcattctctctatctctctctctgcctcacactggagtaccctcttcaatttccatcaattaagtttctctaataccctctgaatcatcatcatcatcatcatcattagtcatggctcttgtgatatattttgtgctttttcttgccctcactggccattcaagtgctctttactgtgtatgcaaagatggtgtgggtgatcaagctcttcagaaagcaatagactatgcatgtggtgctggagctgactgtaccccta

SEQ ID NO: 24349 - DNA, 292 bp, Glycine max
  Clone ID: 701100920H1
gttctctgtttggaaggcagcggaaacaaacatgtcgtggtgttactgcgctaagcctatgactttgcagttgccgttgcaaccaagagcatcatcatcattccattcccacgttggaggagtaacagtaacatcctcaacactgtctcttcgactctcttctactcttgttttcacccacaacctccacttccaacccaaactcaaacgcgcttccacaaccgttcgatgctcctcggcattgactcctcaattgaagtctaccttggatcaagttattgcttcaaataaa

SEQ ID NO: 24350 - DNA, 291 bp, Glycine max
  Clone ID: 701100921H1
gaaaattcagcatctttaaagccatggcggttgtgggagacgaaaaggagcaggaggagcttattcctggcttaccctacgaaattgcagagctgtgtcttcttcacgttccgtacccttaccaagctttgtcgcgctctgtttcgtcgacgtggaacagagcaataacgcacccttcttttattttctccaagaagaccctctcccgtcctcacctcttcgttctcgcgtttcattcacaaactgggaaaatccagtggcaggcgctcgacccttcctcggggcgctggt

SEQ ID NO: 24351 - DNA, 291 bp, Glycine max
  Clone ID: 701100922H1
atgaactcgacctgaaacaacttgaacggtttctacggttggacaacatgggtgctgagtgggacaacatggatgacctgtggatgctggacgacgtcgttgtgcccaaccgtcacttaatttactagaagggagataattaattaattaataaatggcgttttcttaagttatagttttataaaactatgttggtgtatgtgttcttagttttctgttttgtcttgtcctctcgctttggtaatttctgttttgtacggtcgaattatttcaaaattaggtgcaacgtat

SEQ ID NO: 24352 - DNA, 289 bp, Glycine max
  Clone ID: 701100923H1
ctcccacgacaacgtatcacaagctcccaatatagcaagcagcaaacatgatttcttccgtgtcctttccagcgtctcttcccgccgttaacttctccggcaacgccatggcttcgccgtcgtgccgcgtcaaatcccggccaatagtcgccttcgccaccgccactgccaccgctgaagctcgctcttcctggacggagcaaccgagaccttcctatctgaactcctcttgctcttcgctttacgatatcctcggcatccccgctggcgcctctaaccaagaaatcaa

SEQ ID NO: 24353 - DNA, 293 bp, Glycine max
  Clone ID: 701100924H1
ctcgagccgctcgagccgaatcggctcgagttcaaacaaatctcacttaattaccttttttacaaacaaaaataaggtagatctaaaaagtagccagtgcaagattttagaattgacagtattttcttataattttgctttaatgttctgtaggtgggaataatgacttgacctttcaatctagaaaaaaaatggggatactttctctgcaaaagtggtagctggaaaatttctctaaaggttctttatgtgcttgcgaggggcatgcatgtcctcttgagcctaaaccaaat

SEQ ID NO: 24354 - DNA, 290 bp, Glycine max
  Clone ID: 701100925H1
gaataatactcaagtgcaatcgcctcccgtactgaacgaaagaccatatttgagtcacccacacccacaaaacttattgccccttttacactaggcttgtcagactctcggcgatctaagttaacagcagagaggcagcaggataactatgaatttctctctaaatgcataaaagaaaatttgggattcaaaaatggtaaacctattgcagctcgtattatatacaaatgtctacttcattggcattcatttgaatctgagcgcacaaccatttttgattccataatcga

SEQ ID NO: 24355 - DNA, 292 bp, Glycine max
  Clone ID: 701100926H1
atagatttggtatttggttacaagcaacgtggaaaacctgctgtagaggcagcaaacatcttctactacttgacttatgaaggtgctgttgatctggaaacaatggaagatgatttgcaaagagcagctatcgaagaccagatagccaactttggtcagactccaatccagatatttcgtaagaaacacccgagaagagggccacctattccaattgcacatcctttgtactttgctcctgattctattagtttgacttccattgtttgtaatacaagtcaatattcatctg

SEQ ID NO: 24356 - DNA, 291 bp, Glycine max
  Clone ID: 701100927H1
tggcgccagtccttccacttctccccctccatccccggcaagtcccaccgcgacgccacgcgcctccacgaggagatggccgtcgatctcatcgaggccaagcccggcaacagaatcctggatgtgggctgtggcgtgggcggtcccatgcgggccatcgcggcccactcgcgggccaacgtagtcggcatcaccatcaacgagtaccaggtcaaccgcgcaaggatgcacaacaagaaggcagggttggagtccctctgcgaggtcgtgtgcgggaattttctcaagatg

SEQ ID NO: 24357 - DNA, 290 bp, Glycine max
  Clone ID: 701100928H1
caaagctcctcctgttatttcttggtggttggaggaggttcagaggaagaagaagatgagttaggagaaattaatattaactcttcaattttgtagtccaatacgatccatccatggtgggggaatcaagaaagtggctgatacttttggcatcaatatgggtgcaggcattcacagggacaaactttgacttctcatcatactcatctgagctcaaatctgtgcttgacataactcagcttcagctcaattacctctctgtggcctcagacatgggaaaggcctttggg

SEQ ID NO: 24358 - DNA, 289 bp, Glycine max
  Clone ID: 701100929H1
gagaaaggaggccaccagaaaagcatggcaattttctgcatcaagtatggatgcaacttatgagcctttaatttgtggtagcatataacaatcaactttggttcatcaaggtctgtccaaattcaatcaccaaatttaatcctctccctatttatgtaagtccacccactttatataccaaattgaaatttggtttgttcaaatttatcagtaagttatggtcaaggtgaatttctgcacccttttgctaccatgtttgaaaggttgagtagactaagccatgatctat

SEQ ID NO: 24359 - DNA, 286 bp, Glycine max
  Clone ID: 701100931H1
gtcagctttactttggcttgctgtgattactagcatatcactactaattgctctcaacgttgggggatccagtctcttcaatccctaaggttggacagtagatataattagatcaattttcttttatccgctatttacagtgttcgtatattcgtgagtgcttctgatggagaaaagcatctaccggcggcgcatatttttggcttcattttgtgagagctacaaattttatttcagcttaaatgtgtgtattacttgtctatatccaagcattttcttatacccg

SEQ ID NO: 24360 - DNA, 286 bp, Glycine max
  Clone ID: 701100932H1
cggtggcgggaccggtggaggagatgttggagtggctgtcgccggtggcgcaggacacgatgcggtggcaggtggagaggagcatggagacggggaggtttgaggcgaagacgacggcgttgctgctgcagacgctgcattactccgacttggagaaggcggaggcggccattgtggaggtgttggtggggttgagttgcatatattggtgtgagagaaggtgaatttagaatggagaaattttattacatggattaagaacacacatgtttatgatcaggactaa

SEQ ID NO: 24361 - DNA, 285 bp, Glycine max
  Clone ID: 701100933H1
ctcatctctgcccaaaaccctcacagtgacgccgtcatggtgccacactgccactttcactgattattcgtcgacggttccaactcaacaatttgtcatctctctgcgacttctacttacaagtaacaagttgttggaacttcttacgagttaagagccatttattctgcatcctgtttttgcttcaataaaatggagacaaaatcatccagttcctctacaaacttggtagaccaatcagtgtgtcctggagatgtgattcttgatctgtctaacatgacaaac

SEQ ID NO: 24362 - DNA, 208 bp, Glycine max
  Clone ID: 701100934H1
cgcagatctaatggtttcacacactttcttcactctagatcattctcttcttcatcatggggcaccccaatagcttctactaatcgatagtcaaattttgttgggttcggatgccggtggtagacaggatggactattgtggtacaaggactcggggcagcacttgaatggggatttttcaatggctgtaatccaagccaataacttg

SEQ ID NO: 24363 - DNA, 289 bp, Glycine max
  Clone ID: 701100935H1
aaaacgttaaggtgcccccacaaacacaactaccacctttgctaataaaaaatatctccttttttccattttcattttgaatttcctttcatcttctatatgttattgccattgctacacaaacaatacaaaacaccaccctttaaccgtttgcaacggttgctttgaacgaagggagcagtaacggctatgttataatttctgagtttgtgttgtagagagaagttacgttctgagaggccaagatggattttacttcgttcttgacgtccctggggacttcctttgt

SEQ ID NO: 24364 - DNA, 289 bp, Glycine max
  Clone ID: 701100910H1
atcagaataaaaaagataattttggtagtgatgcaccacattttcagagtggagttctccgtaccaactgcattgactgcttggaccgtacaaatgttgcccagtatgcttatggtcttcaagctttaggacgccagctccatgcaatgggtttgactgatgttccaaaagtggatcctgatagtagtattgctgcagctctaatggatatgtatcaaagtatgggagatgctcttgcccagcaatacggtggctctgctgctcacaatactgtgtttccagagaggca

SEQ ID NO: 24365 - DNA, 271 bp, Glycine max
  Clone ID: 701100879H1
aaacactgaaacaagaaacagaaaacactctctttctctctctttctttagattatactactatcataagatcgttgttttacttagaatctgaactcaactcgccggagccaacaaatctcgccggaatattcctccgggaaatggggtttctgaaaaactactgagaattaacaaaaaatgggcgacgaagaagtattcgccggagcttcgggtctccggcgagcggtggagctaatcttttccgtgctctcactctcgcactcgattc

SEQ ID NO: 24366 - DNA, 271 bp, Glycine max
  Clone ID: 701100883H1
aacacactctgtgaaaaagggggagtttcttattccttctagacgcttccattgatcggcgatttctgatacatggcggacatcacgaacacgaggaagtgaagggtgagtccttgttggagaagatttctgggaagatccacgaccacgattcctcgtcttcgtcggattccgacaacgacaaaaccagcgccactgattccttcaagtctaatgttttcaggcttttcggcagagaaaagcccattcatcatgttcttggcggtggaaa

SEQ ID NO: 24367 - DNA, 273 bp, Glycine max
  Clone ID: 701100884H1
gttttcacctcctccaggggatccaccaagacccttggcaacttcgttaaggctacttttgattgcttgatgaaaacctatggattcctgacaccagaattctggaaggagactcgcttctccaaatctccattccaagagtacacagatctattggcaaaaccaacagggaagactctaatcttggaggaggaaagggtggatgcttgatttgctagttttggttttatggatgttttagagacattgttatttacctttgttggttctgtg

SEQ ID NO: 24368 - DNA, 290 bp, Glycine max
  Clone ID: 701100885H1
agaattcggctcaaggaaagagagtgattctacattacaacacctcaaggggaagaatgctgatgattatcaagaagccactgaaatcagagatcatacagaagcctttcaaaagcaaacaggagctagcatcattggcttatttcaaatgcaatatttgaagtcacttaccgtaggcgttggcttgatgatactgcaacagtttggagggattaatggcattgttttttatgcgaactctatatttatatcttctgggttttacagaagtattggagcaatagcaattg

SEQ ID NO: 24369 - DNA, 274 bp, Glycine max
  Clone ID: 701100886H1
gccataacgcataagccatatctccttttcccttctctttgattatctttcttttaaattcctgtttggttcaaatatagaaaccagaagaggattagtaataatcattgacaattgtagtgaagtgatgtcaatttcaaggtctcaagtggggtgtctattgctgatactactaagtatttcggttttgaaccatcaagtattgggtgctcggtatgtaaaagaagaagtggaacatttgctcaacaagtctgcagtatggaggaaaagcttt

SEQ ID NO: 24370 - DNA, 274 bp, Glycine max
  Clone ID: 701100887H1
gacagatcttgctctttcatcttttcaaatctgtcgccttgacttccctttgctaaaacacaccatccgctatggctgagcaaaataacaatcgggtgagttcggtcggttgatcgggttacattgggcgggctcggtttggacatttgtttccgtcgaaaaccaaacccgcctgtaataaaatattaaaaagttcaagtgaacgtcagaatttcagaaagtgagttgtagcagtcccgtcccctcatgtctccatttttgtactattataata

SEQ ID NO: 24371 - DNA, 274 bp, Glycine max
  Clone ID: 701100888H1
gccgctgagacacgaagagtaactgcctcgcaacgccgcccttgccatcgcgacagagtgtcgtacacagcggactccctcgcgacgccatcctcactgtgccgtttcaggtgtttgacgaaattccccataaacgaagctcatgggcaagaaaggaggggccaaaaaattagagtctgtgtctcacactccaatatcattgagggaagaagccaccggaaaaatacaaaccaaggcagcctcaaacaccaagtccaaattgagatttgagcac

SEQ ID NO: 24372 - DNA, 271 bp, Glycine max
  Clone ID: 701100889H1
ctcttccctctttctcgctctcaccttacacctctctgtttccctcttcatttcgattcttctgcttctggcaagcagtttgtgatgaagattgagtaagagatttattttttctatgaggtcaatcaaatcatggaggtggtccacgagaaatctgagtttcttgcctaatgggaaagtcaagtttgaagatgaaacaactgccttttatggcggttgtttgtatagtaatgttgtttgttgtgtataggactctaaagtatcaaagtta

SEQ ID NO: 24373 - DNA, 269 bp, Glycine max
  Clone ID: 701100890H1
gctgctattgaggctgcgacatttgcccaacagtatgattctgtgggatgggctccatgagactacaatccagatgccaaacaatctactggtccagaagttggtgctccacaatcaggctttgtttgggatgaagcatcgggctattactatgatgctgcttctgggttttactatgatggaaatactggtctttactatgatggtaataatgggatttggtattcatatgaccaccaaactcagcagtacacaccttgcactgatca

SEQ ID NO: 24374 - DNA, 271 bp, Glycine max
  Clone ID: 701100891H1
ctcgagccgccaatatattccattctctctgtgtatttccctacctctcccttcaagatgcagatcttcgtcaagaccctcaccggcaagaccatcacccttgaggtggaaagctctgacaccatcgacaacgtcaaggccaagatccaggacaaggaaggaatccccccggaccagcaacgtctcattttcgccggaaagcaacttgaggacggccgtacccttgctgactacaacattcagaaggagagtactcttcacctcgtcctcc

SEQ ID NO: 24375 - DNA, 185 bp, Glycine max
  Clone ID: 701100892H1
cttctttcttctctcaccttttcctctctcaatttcctttcccttttgaaattatgatataagagaacaaaaactcccccttaaacagataaggtatatataagccacccttcagagcaatttgtccatcttcttcaatttattagcagaagatgtggtgcattagattaccttagtctttgtcc

SEQ ID NO: 24376 - DNA, 270 bp, Glycine max
  Clone ID: 701100893H1
gaattctctaaaagagatctttttctgctctttgaagaaagaagggtctttgcttgattttcgagatgtctctgctctcagatctcatcaaccttaacctctccgataccaccgagaaggtgatcgcagagtacatatggatcggtggatcaggaatggacctgaggagcaaagcaaggactctcccaggaccagttagcgacccttcagagcttcccaagtggaactatgatggttccagcacaggtcaagctcctggtgaagacagtg

SEQ ID NO: 24377 - DNA, 272 bp, Glycine max
  Clone ID: 701100895H1
cgccaaccttttctcttgtcactctctacaaccttttctagcattgaaaattcttttcagaatcccccctgcttgtatcaaaatgttaaacaagtatgtccacacgaacaaaagcaatgcctagcatctggttacccataattatcaataagcttgtaagatgtaaccattttctatgtgcttatactgtgataaagaaaaagaggcaaataaattcaattgtttgccccattaaagaattaggcttgtttgcaatatttgatggccactta

SEQ ID NO: 24378 - DNA, 271 bp, Glycine max
  Clone ID: 701100896H1
tctccacctccggccgccgtggatgccgacgccgccgggagctccggcatctcaccgtcggaggattgcgacggcgagggcggcgacgaggaggagccgctgatccagatggcagagtgccgcatctgccaggaggaggatggcgtttccaacttggagaccccctgcgcctgtagcggcagtcttaagtatgctcacagaaagtgtgtccagcattggtgtgatgagaaaggagacataacttgtgagatatgtcatcagccatatcaac

SEQ ID NO: 24379 - DNA, 289 bp, Glycine max
  Clone ID: 701100901H1
cgaaagggaatcgggttaaaattcctgaaccgggacgtggcggctgaggcatccatcggcagttagagacagagagagagagaaacaaaaccctaattggtgagtggcgaaaatggcgcagcaggcggcggcagcagcagcaacaggagcagcagtaatcgagcaagtgcagtgcttcgggcggaagaagacagcggtggcagtgacctactgcaagcgtggtcgaggcctcatcaagatcaatggctgcccgatcgagctggtggagccggagatcctccgtttcaag

SEQ ID NO: 24380 - DNA, 288 bp, Glycine max
  Clone ID: 701100903H1
cttctttttactctctctctgtctctctctacgctttctcgttcgagatccctcaagggatccactaactgaaggagaaatggggttgacattcaccaagcttttcagccggcttttcgccaagaaggaaatgcgaattctgatggtgggtctcgatgcagctggtaagaccaccatcctgtacaagctcaaacttggagagatcgttaccacaattcccaccattgggttcaatgtggagactgtggaatacaagaacattagtttcactgtctgggatgttggtgg

SEQ ID NO: 24381 - DNA, 292 bp, Glycine max
  Clone ID: 701100904H1
cacaacacaacacagcataccgtgtttcattttctctcacacacaaacctccttcgttttcatttacttctcaggaggtataactactatttttcgctttttttttaaaaaaaaaattgattaaatcttttgccatgggaacccagattttgcgacctcaggactgcttggtagaacgaatcagggctcctccggctgacttttcccggcggaggagttccggtaattactgtaattattattactacaacaacaacaacaaccatgtcgccacttccaggtcgtgccggaa

SEQ ID NO: 24382 - DNA, 293 bp, Glycine max
  Clone ID: 701100905H1
ctttttgctgtgattgctgactggttccaaaataattgtgatcttatgcccataaaatcacagttagatagtctaattagagaaggctcctcagaatggaggaacttatgtgaaaatgatgcctacagagagcggttccctgacaagcattttgacctggaaacagtcattcaagcaaaaatacgtccgcttactgtggctcctgggaagtcctttattggtttttttcatcctgaagggatggatgaaggcagatttgactttctgcatggtgccatgtcttttgataatat

SEQ ID NO: 24383 - DNA, 292 bp, Glycine max
  Clone ID: 701100906H1
ggccaatctccaattgcaattgcggaagacacaaaactcgaactctgaattacttttggctgtgacagaccttgaagcaatgctggaacaaaagaataatgaaatattggatctgtctaccaatacaaaatcccagaagattactaaagagcatgatgatgccacagaattagatcgcttgcggcaaaaaattgcagaccaggatgaagaaatagacaattactacaagcaacatgaagagctaagtgagcaaataaaagaactcactttggagtatgatcttcttaagaag

SEQ ID NO: 24384 - DNA, 291 bp, Glycine max
  Clone ID: 701100907H1
atcttttccaaggtgctgaacctgatcctcccttcactacaggagatcatcttattgaaaacgctggtaaaatggttcttttggataagttacttcctaaattgaaagagcgcgattctagggtccttatattttcacagatgactaggctactagacatactcgaagattatttaatgtttcgtggatatcaatattgtcgcattgatggaaatactggtggggatgatcgagatgcttccattgatgctttcaacaaaccaggaagtgagaaatttgtcttcttgttat

SEQ ID NO: 24385 - DNA, 293 bp, Glycine max
  Clone ID: 701100908H1
gtggagaagaagaagctcggagtcgaagaagacacgtcacaagagtgtaagtaagcaatagcatgaattcggtggcgatgacggtggcgtcaatgttgttcgccggcggctgtcgtatcctcgccgtgcctgcgcgggcgcgcgccatccgcatcccgcgagcagctctcagcagtcaccacaacaagcacgctccgagttggggctgtcggagttcacacaacagtaacactgcactcgccggtgaagccgaattctcaacaaccgacgccggaaacttaaccgctacctct

SEQ ID NO: 24386 - DNA, 292 bp, Glycine max
  Clone ID: 701100909H1
cctcgagccgaatcggctcgaggttcaatcccttcacgctacattaggcctcactcccaaagaccctccaataccacttcttttccaactcctaaaccttttcaaactgatcatcatcatggtcatgatcagaaaacttccgatcatgaccatgatcatgatcatgttaacattcccgtcattgacctgaaacatgttttctcggaggatccgatcctccgagaacaagtgtttgggcaggtggaccaggcatgtcgggagtgggggttcttccaggtggtgaaccatggtg

SEQ ID NO: 24387 - DNA, 269 bp, Glycine max
  Clone ID: 701100878H1
tatcatcagagctttgtgaaacataaagttaaagcatggcatattgcagagggagcaaaccgaatatttcaaaacttgttctactttttattatcactgttgcatttatttcagatatttagtatttgcctacaagtttgttctttagtttaaacacagacaagacgactctttatggcggctataaccaatttgaacttttcttccttgtgtaaaaaaaggttttgtgtgcgtttgtgcgtgttggagttggctttttgaagtgggtg

SEQ ID NO: 24388 - DNA, 274 bp, Glycine max
  Clone ID: 701100851H1
gagaaattaagaagctagtttgcttgtttttcggtgaactcagggagtcagatagataatactgatcccccgagatattgagattcatctaagagattaatatcatcctacccaaccacaagcttagattgaaacaagatggaagtggtggtacaaagtcctagtagtccaaccatggataatttcgattttggtggcaacatgggttcgatctatcaaagtgttccttcttcaccaaaaggttttggtaattactacctaagcgcacccgcga

SEQ ID NO: 24389 - DNA, 276 bp, Glycine max
  Clone ID: 701100852H1
cgttcatgaggtttgcttgggtggtgcgaccgcgtaacctacatcttcttgcatgccatgtcaccaatgagactatgcaactatatcaactctcaaggtggttcagagctcaaaggacccttgaacagaacaaaaaggaaacagatgcagagtgaaacgtcgatttgtttgaactttgaaattcaaagaaaaaatttgtcctatagctttagaaacaattccttgacagtaaaaaataaaataaaaaacaaaaaaaaaaacaacgcctttatgact

SEQ ID NO: 24390 - DNA, 276 bp, Glycine max
  Clone ID: 701100854H1
aacgaatgtattattagtattgagtttgttcctccatcgcgaaattagggttcgctcacttgtcttcaatttcccaaattcaccctgcaccatccttgaatcctccaattgacacgccttttggatccatttttctccgtgaggccgtgacgcatcgcgattttgttttgggaacccgcgaaactgaatcagatagtgcggcacggaaactaggaattagagcaatggcagaagatctggtgctggatactgcaatcagagactgggtgctgatcc

SEQ ID NO: 24391 - DNA, 270 bp, Glycine max
  Clone ID: 701100855H1
gtccatctgacttgcaaactatttacctagattgttgcactagtgggtgactcaaaattggcttccttcaaattctgtcatagaaaaaagtccagcattcttcaacaaaggagatatatatattttagagacaattcctggcctcccaatgcttaccaaggcaagttacatgtttgatgtttctttcacttgttctattatgtgaatatatacataggctctttttggataaattttccagtacttacagaaaaagaaaattaagaaggt

SEQ ID NO: 24392 - DNA, 278 bp, Glycine max
  Clone ID: 701100856H1
cgaagacggcagaactctcgccgattacaatatccagaaagaatcgacgctccacctcgtcctccgccttcgcggtggcatgcaaatcttcgtcaaaaccctaaccggtaaaacgattacgctagaggtcgagtcctctgacaccatcgataacgtgaaagctaagatccaggacaaggaaggcattccaccagaccagcagcgcttgatcttcgccggaaaacagctcgaagacggcagaaccctcgccgattacaatattcagaaagaatcgacgc

SEQ ID NO: 24393 - DNA, 273 bp, Glycine max
  Clone ID: 701100858H1
gcggtgcggcgatcctagcactctcttctgcagctttcgccgacacgttcattcaccatggctgagcaaaccgagaaggcttttttgaaacaaccaaaagtgtttctcagctcgaagaaaactgggaagggaaagagacccggaaagggtgggaaccgcttttggaaatccattgggcttggatttaagactcccagggaagccatcgaaggaacctacattgacaagaagtgccccttcactggcaatgtttccatccgtggccgtatcttg

SEQ ID NO: 24394 - DNA, 271 bp, Glycine max
  Clone ID: 701100859H1
gttgaacatgattgggataaaaaaaaactcaacaaccactgttgctgtgaacctagcaagtagataacttgtaccaatttatctgtgtgtgtgtttaggtgggcaattttgaaatccaggcgatagagaaagtcccgtagttcttaatttgtgtagtattttatgttccagtttagggtaacagtattttgtgcgtgttgctcattggttgtctaaagtagtagaataaggatttattgtttcttgtcatgagttggggaatatacctatg

SEQ ID NO: 24395 - DNA, 268 bp, Glycine max
  Clone ID: 701100860H1
tgagagtttccgtagtctgtttcgatccatcattcaaaaattcatggaggtttatcaacctgaggcagttgttctacaatgtggagctgattcattgtctggtgacagattgggttgcttcaacttgtctgtgagaggtcatgcagattgccttcgttttcttagatcgttcaatgttcctttaatggtcttgggtgggggtggatatacatctcggaatgttgcccgttgttggtgttatgagacagcagtggcagtaggagtggag

SEQ ID NO: 24396 - DNA, 273 bp, Glycine max
  Clone ID: 701100862H1
ctttgttggttgtgaagtgtgtgtgtgattctgggttgtctgaaattgtggggtgtgtgtgattcaatcgaggagtgtaattgtgatgtgctgggaacagttttcgattgaattggtttttgggcactagatagcaatggccacggtggagaggatcctgttggcgctgcaaaatgagggtgcaggaggagaataccttgttggggtcaatcaaaattgctgtgatgcccatagttaaagtgttcaccatgtgctccttgggactccttatgg

SEQ ID NO: 24397 - DNA, 276 bp, Glycine max
  Clone ID: 701100864H1
gtttcagtgagtgatcggtgttcacttgatccttcataagtcgtcatcatcatcatcatcatcaccgttgattgaagaagatgccgatcagaaacatcgccatcggaaggcctgaagaggctactcaccccgacacgttgaaggcggggttggctgagttcatctccaccttgatcttcgtgttcgccggttcaggttccggcatcgcctacaacaagctcaccgacaacggcgccgccactcccgccggcctcatctccgcttccatcgcccatg

SEQ ID NO: 24398 - DNA, 273 bp, Glycine max
  Clone ID: 701100865H1
gttgattagggacgaggtgggccgggtgatgggcccgggccaggagtttccttcgtttgatgaaatccgcgaaatgcattacctgaacgcggcgattcacgacagcatgaggctgttcccaccgattcagttcgattcgaagttcgccacggaggatgacgtgttgccagatggcactttcgtgagaaagggcagtagggtaacttaccacccttacgcgatgggccgaatggaaaatatttgggggcccgattgtcttgacttcaggcccga

SEQ ID NO: 24399 - DNA, 273 bp, Glycine max
  Clone ID: 701100866H1
gatcgctgcccacagtgcaagggagagaaggttgtgcaggagaagaaagtccttgaagttattgtagaaaaggggatgcagaatgggcagaagataacattccctggcgaactgatgaagcgccggacacaattactggggatatcgtctttgtccttcagcagaaggaacatcccaaattcaaaagaaaggctgaagatctttttgtagagcacactttgtcccttaccgaggccttgtgtggcttccaatttgtgctgactcacttggata

SEQ ID NO: 24400 - DNA, 273 bp, Glycine max
  Clone ID: 701100867H1
acaaaacattacttcaagctggagaatcaccaccatgccatcacacaccttcaaccagaggagttatcatcctcactgcttgcatttaaatcccatatgtccaaatcaattgaccaactagcatcggatttgaaacccggatcagagacccccctgtccttaacatggtttggaaagtgtttcggcctcttgcccttcatcaacaaggcttttggaaagcttgttgtggatattgactacccaatgagtaaattggagatcttttccattgaa

SEQ ID NO: 24401 - DNA, 275 bp, Glycine max
  Clone ID: 701100868H1
cagagagaggcgcttgccgtaacgctaattgtgaaagaagatgcaaccaacatccaacggctctgattcgcaagcgacggagcagcggacgccgccgccccagtggatgccgatgcagtacccggcagcggcgatggtaatgcagcaccacctgatgccgcctcaacattacgctcctccgccgccgcagccctacatggcctaccaccactaccaacaacagctgccgcacgccctgcacgcgcaccatcagggatccagtgccgagaacaaga

SEQ ID NO: 24402 - DNA, 272 bp, Glycine max
  Clone ID: 701100869H1
tgatgctgtgttgtttagtaatgagctggaaatactaaccttgcgctggaaagaattgtacccttacataactgaatttgttgtccttgagtcaaattctaccttcaccggattgcctaaggctctggttttcaatagcaatagggagcagttcaaatttgttgagccgcggttaacttatgggaccattggtgggagatttaagaaaggagaaaacccatttgttgaagaggcgtatcagcgtgtagcattggaccagctcctgaagatag

SEQ ID NO: 24403 - DNA, 274 bp, Glycine max
  Clone ID: 701100870H1
ctcgagccgcaagaaggccactagctctggggagaagaatgttctcatcttcgacctcggtggtgggacttttgatgtctcccttctcaccattgaggagggtattttcgaagtgaaagccactgctggtgatactcacttgggaggtgaagattttgataacagaatggtgaaccattttgttcaggaattcaagaggaagaacaagaaggatattagtggaaatgccagagcattgaggaggttgagaacagcatgtgagagggccaagagg

SEQ ID NO: 24404 - DNA, 272 bp, Glycine max
  Clone ID: 701100871H1
aaggcattccaccagaccagcagcgcttgatcttcgccggaaaacagctcgaagacggcagaaccctcgccgattacaatattcagaaagaatcgacgcttcatctggtgcttcgactccgcggagggatgcagatcttcgtgaagacgctcaccgggaaaactattactctggaggtggagagttctgatacgatcgataacgtgaaggcgaagattcaggataaggaagggattccaccggatcagcagcgtcttatcttcgctgggaag

SEQ ID NO: 24405 - DNA, 274 bp, Glycine max
  Clone ID: 701100872H1
gttggcgttgttcagttcttctacctctctttgaacaacatctcacaattcattcaccttttaattcttctcactcacaaatcacaatgctcttccttttttccttaataataataccataataatctgttacgttacggggcccaaatgtctgttacggagctcaaggagcgtcactctgctgccaccgacaccgtcaacaatctcagacaccgtttaaagcagaagcgcctttcgttgctcgacacagatatttctgggtatgcaaggtctc

SEQ ID NO: 24406 - DNA, 269 bp, Glycine max
  Clone ID: 701100873H1
gggagcaattgtttgttggtggctaccatgtttcctatgaaggacaactgttacattagtcttgtggatttcagggacaagaagatggtgtggtgttggtctgatgtgggggctccttttgccgtggatgagaaacgggtcagggatgctattgccatggaggataataactccatttgtgtggtcaatgagtttgaggatttggggttcatggatttgagaagttctgctgccaatagcattaggtggagctccaggagtaggttgat

SEQ ID NO: 24407 - DNA, 273 bp, Glycine max
  Clone ID: 701100874H1
gtacccttgccgattacaacattcagaaagagtccaccctccacctggtgctccgtcttcgtgggtggcatgcaaatctttgtcaagaccctcactggaaagaccatcacccttgaggtggagagctctgacactattgacaatgtcaaagctaagagtcaagacaaagaaggtatcccaccagaccaacagaggctcatttttgctggaaaacagcttgaagatggccgaaccttggcagattacaacatccagaaagaatctaccctccac

SEQ ID NO: 24408 - DNA, 151 bp, Glycine max
  Clone ID: 701100875H1
agattaatcatcttacttatttattctccgaaaatggttgatttacattggaaatcaaagatgccaagttccgacatgccttccaaaactctaaaactctctctctccgacaacaagtccttagcctctttgcaactacccttccacacaa

SEQ ID NO: 24409 - DNA, 271 bp, Glycine max
  Clone ID: 701100876H1
cctccttacactccccacccagtttatcactctcctccaccacctcctaccaacaagccttacatctatgcgtcacctccccctccttaccactattagctagcatagctctatggatatgaagaatatgtgcaacgaataaaagaaagcgatagaaaaggaagaagaagcgcttcgcgatgcacgaaagagaagaattggaagcaaagtttcggcgttttgtcttttataaaaaaaatgttaaatcattataattttctatgatagggat

SEQ ID NO: 24410 - DNA, 269 bp, Glycine max
  Clone ID: 701100877H1
taaaaattggtcaaaatctatcctatctctttgcatattctttcttatcatcatcttcttctctcttgcctccagaattgaaaagttcttcctctgcccatagtctttgacacccttttccaatctctagtttttttattttcttccctctataattatctccttcacaaaccttctatccctcataacatcaattaccacaaacccaagccttgtacctctcaaagtttgattcttttctcttgcccaaagcgatttggattgctata

SEQ ID NO: 24411 - DNA, 275 bp, Glycine max
  Clone ID: 701100850H1
agaagaaggacaagaagaagaaggagcatggacatgaccatcatggtcatagcagcagcagtgacagtgattagatcttatatgttaaggtgtacggtacgatggtagtgaggagccagaatccctcttcctgctttatgatataatacaaataaaatagcgattccggaaatcatgtctgtagctgctctttttatttatgtgataaatgtaaaacgctttggtttggcttggccgttgtgcattaggttgaaaaaataaatgttataattact

SEQ ID NO: 24412 - DNA, 276 bp, Glycine max
  Clone ID: 701100816H1
gtaccgtgccagtgggacgtgttgagactggtgtcgtgaagcccggtatggtggtgacttttggtcacactgggctgacaactgaggttaagtctgttgagatgcaccatgaggctctcacagaggctcttccaggtgacaatgttggctttaatgtgaagaatgttgcagtcaaggatctcaagcgtggttttgttgcatccaactccaaggatgaccctgccaaggaagctgccaacttcacatctcaagtcattatcatgaactcacctggcc

SEQ ID NO: 24413 - DNA, 275 bp, Glycine max
  Clone ID: 701100817H1
gggaaaccaggtgttggcgcactctttgtgaaggtcagcatggatggtgctccgtatcttaggaaggtagatctaagaagttatacaacttatcaggaactatcatctgcccttgagaagatgttcctaagctgttttaccctaggtcagtgtggttcccatggagctccaggaagagaaatgttgagtgagagcaagttgagggatcttctgcatggttctgagtatgttctcacttatgaagataaagatggagattggatgcttgtagggga

SEQ ID NO: 24414 - DNA, 277 bp, Glycine max
  Clone ID: 701100820H1
ccaaaacccccagtgtacaagcccccagttgaaaaaccaccagtgtacaagcccccagttgagaagcccccagtttacaagcccccagttgagaagccaccagtttacaagcccccagttgagaagccaccagtatacaagccaccagttgagaagcctccagtgtacaagccaccagtagagaagcctccagtttacaagccaccagtagagaaacctccagtttacaagcccccagtggagaaacctcctatttacaagccacctgttgagaagc

SEQ ID NO: 24415 - DNA, 279 bp, Glycine max
  Clone ID: 701100822H1
tcttgattcattttgttgtctcaattaaacctttgttttggtctgaattgaaaagggttgtgaattaatagtgatgtttctctctagatcaattctctttgtgtttgtgttctcagcttgcttgcttctatttccagccaatggaattcgatcatttgccacaacaaatggttatgaaactgaggttgaagaagttgatccttttgtgcaattcagagaggccccagaatacagaaaccagcaaaagtgcactctaattgacacaaccaatgttcaatt

SEQ ID NO: 24416 - DNA, 275 bp, Glycine max
  Clone ID: 701100823H1
gtcgacatgctgcgaaagcacacgtacaatgacgagctggagcagagcaagcgcagcgcggcgtcgtccggcggcgaggctccgccgtcgccggcaccgcaaactcaatttccggcgcgtgctttactaaggcacgtgagcagctattcgagaaggctgttacgccgagcgacgttgggaaattgaaccgtttggtgataccgaagcagcacgcggagaagcactttccgttacagagctctaacggcgttacgcgacgacgatagcggcggtga

SEQ ID NO: 24417 - DNA, 276 bp, Glycine max
  Clone ID: 701100824H1
cggctcgagatccgaaggcatattttgagattccatgggcaagtttgaggggattggttgagccaacttttgctgaaaggatagtgatcaaccatagagagtacttcaaaaagggtaaccttgttgtatccagtgctgtcaacataactgaaactgcagtggtgactgaagatggccagcagattgcctatgactatcttgttattgccactggacacacagaaccaatccccaaaaccaggagtgaaagacttgaccaatacaaaggagaaaatg

SEQ ID NO: 24418 - DNA, 276 bp, Glycine max
  Clone ID: 701100828H1
caaaaacaatcatcaatcatgggaagcgatagaaaatcgaaacgagcttcaccctcccaacgtgaagatgagaagagaagcaagaggcagagaacggtagaggatgaggaaaggaagaagcggaaaagggaaaagaaggagaaaaggaaggacaagaaatctcaccagcattccaaagaaaataattctgataaggggaagttgaaagataagcacagaagcaaacatagcaaaggtgatgaccatatggaattccaagaattgtcaaatgatgac

SEQ ID NO: 24419 - DNA, 273 bp, Glycine max
  Clone ID: 701100829H1
cggctcgaggagaatagagagggtcgtgctgcagctttcggtgatgatattgcaattgaatgccttgctacagagttcaagcgagagatatatgtggttggtgcggtgctggagctgaccactatgagcccctcattgctcatccttccgcctttgtttcccaagaaaaggttgctgtggtactgtgaggtttcgcggcctgcaattttgtggagtagagatcgagtagaattagaattttcttcaccctattttatgggccactctcaactg

SEQ ID NO: 24420 - DNA, 274 bp, Glycine max
  Clone ID: 701100831H1
caaaagggaaagatggtgtgcataaggaaggcgacggtgaaggaccttctggcgatgcaggcgtgcaacctgttctgcctccctgagaactaccagatgaagtactacctctatcacatcctctcctggccccagctcctctacgtcgccgaagactacaacggccgcatcgtcggctacgtcctcgccaagatggaggaagagaccactgactgccacggccacatcacctccctcgccgtcctccgcacccaccgcaagctaggcctcgcca

SEQ ID NO: 24421 - DNA, 273 bp, Glycine max
  Clone ID: 701100834H1
gctgagcttatggacattattctccccaagagatctggggggcaagtggcttcatcaccgccatttttctgtggatctccacctagcagggcttcaaaccctgtgatccaagatgagcaatttggtagtaatggtaatgagagttttggttcattttccttggcacccccttcaccatcttcctcagcaagaggctgtgttaggatgaagtttggtcacaccccagcagcagtgaggattgaaggttttgattgcctcagcagggataggcgc

SEQ ID NO: 24422 - DNA, 276 bp, Glycine max
  Clone ID: 701100835H1
ttgaaatctccctttcaaaccttacactcctcatttcgtttccgtagcagttttctcacacttcaccgctgcttccccttcacctccgatttcgtatcagtagtcagagatcaaaatgtctcgaagatatgacagccgtacaacaatcttctcccctgaaggacgtctttaccaagtggaatatgcaatggaggctattggtaacgctggtaccgcaatagggatcttatcaaaagatggggttgtgctggttggtgaaaagaaagtcacatccaa

SEQ ID NO: 24423 - DNA, 272 bp, Glycine max
  Clone ID: 701100836H1
gaaatagatggctcatcagtgagagattcttcttctcctctattcgcaaatttaatctaagctatcgaatgtggtgcaagacttagaattcattttggcacttgtaccctccgaatttcaatggccgatcactcagattcttctcctcttgttcctccccttcccctcgctgacccttccgagatcgacctcgaagccggtccctccgaacaaatccagtgcggaatttgtctcgaaactgacggtagagatttcatagcaccttgtaagtg

SEQ ID NO: 24424 - DNA, 278 bp, Glycine max
  Clone ID: 701100838H1
gcttaatcgaactattcagattctaaaaaatgagttggtggtgggctggagcaatcggtgctgccaagacgaaattcgaggaagaggaaccgccgcgaagcttccagagcgtgggcctggtgatcggcgtgacgggcatcgtgggcaacagcctcgccgagatcctccctctcgccgacacccccgccggtccatggaaggtctacggcgtcgcacgccgcccccgtccgccgtggaacgccgaccatcctgtcgagtacatccagtgcgacgtctcc

SEQ ID NO: 24425 - DNA, 279 bp, Glycine max
  Clone ID: 701100839H1
aaaaaggtcttgcaagacaggcggtacaaaaatcgtgaattgcagttaatgcgcttaatggatcacccaaatgtaatttccctgaagcactgtttcttttccacaacaagcaaagatataactttttctaaacttggtaatggaatatgtccctgagtcaatgtaccgagttataaagcattacactactatgaaccagagaatgcctctcatctacgtgaaactgtatacatatcaaatcttcaggggattagcatatatccataccgccctgcgagt

SEQ ID NO: 24426 - DNA, 276 bp, Glycine max
  Clone ID: 701100841H1
caataacatagcatagagtgagaagtgagaacagaaaaatggcaatctccatacgcagtagacaacttttcatagatggagagtggaaagtccctcttctcaacaatcggtttccgatcatcaaccccgctactgaagacatcatagggcatattccagccgctactaaggaagatgttgaccttgcggtggatgctgctaaaagagccttttcccataacaaaggcaaagattggtcttcagctcctggctctgttcgtgctcgctatcttcgag

SEQ ID NO: 24427 - DNA, 274 bp, Glycine max
  Clone ID: 701100842H1
cgacacgtttacgttcgattttaaaccagttgttctgggtcccgatgttaccatcaagtcactcgccaaggcttcttccttctgatcctcctcatcacctactctacctcaaacttaaaatcaatcttctttttaatgtgtattagttaattaataattcaataaaacaaagtaaatatatatattaaaagtaggatgtgcactggacagcacagcagtactcatgaattgccgcttgttgcattttgtgagagaggtgtgtacattatttgct

SEQ ID NO: 24428 - DNA, 270 bp, Glycine max
  Clone ID: 701100843H1
agtctttctagtacttttcttgtttcatgttggggataggcacttttatactgtcttcccgggaatattcctttttagccttgataaactgatccgaatcatacaatcaagtccaaaaacttgcatggtttcagctagaatttttccaggcagagctctggtgctaattctgcccaaagatccagggatgaaatataaccctactagtgttatatttttgaagattccaaccatatctcatcttcaatggcactctttcagtatcatatc

SEQ ID NO: 24429 - DNA, 271 bp, Glycine max
  Clone ID: 701100844H1
gataggcaaacactattatggagtgctacatggccaagggaggttgagactctggcaaggcagtttctgcgcaacccatacaatgtaattattggctcaccatacctgaaggcaaatcaatccataaatcaagttgttgaagttttaacagacatggagaaatacaatagattaatcaggctgctgaaagaagtgatggacgggagccgaattctaatatttatggagacaaaaaagggatgtgatcaagttaccagacaaatgagagtgg

SEQ ID NO: 24430 - DNA, 270 bp, Glycine max
  Clone ID: 701100845H1
gatgtttctcacaaggactgagtatgaccgaggagtcaacaccttttctcccgaagccgtttgtttcaggttgagtatgcaatcgaagccatcaagctgggatcaactgcgattgggttgaagaccaaagaaggagttgtccttgcagttgaaaagcgcatcacatcgccgctcctggagcctagtagtgttgagaaaattatggaaattgatgagcacatcggttgtgcaatgagtgggttgattgcagatgctcgaacacttgttgag

SEQ ID NO: 24431 - DNA, 273 bp, Glycine max
  Clone ID: 701100847H1
atggagaggcgacttcttagtaggaaccagggtagagaagatgacaatattgaaacaataaggaagcggtttaaggttttcttggagtctagtcttcccgtgattaattattatgatgcaaagggaaaagttcgcaagattgatgctgcaagacctatcgaagaggtatttgagacagtcaaagcaatttttggtccaaagaatgacaaggctgattgagcatgttcatcttgactccatggtggaaatttagaggtcatatcagtattggtg

SEQ ID NO: 24432 - DNA, 272 bp, Glycine max
  Clone ID: 701100848H1
tacaagttaacgagttatgggagctccccggacctcagttttaaaggggctttagggcgttaaaaagaaagcgcagagaaaggtgttgttctcagatccatccatcagtggtgggcgatgttgttgttctcagatccagactgagggggtgaaggaaaatgaagtcgtcgaggcgtctgttgaggatcgggcttgtgtcggcgtggtactcgtcgaacattggggtgctgcttctgaacaagtacctccttagcaactatggcttcaagtac

SEQ ID NO: 24433 - DNA, 274 bp, Glycine max
  Clone ID: 701100849H1
gtcgcgttgtgttgcgtcgtgtcgtgcgctgttcctctgtttctcgtttttgtgttcagaccgaaccctagctccgcatcgcaaccatgtcgaccaagcaaggtggaaaagctaagcctttgaagaaacccaagtctgataagaaggattacgacgagattgatgtggctaacattcagaagaaaaaggaagaggagaaggcgctaaaggagttgaaagccaaggcgcaacagaagggaagctttggaggttctgggctcaagaaaagtggaaa

SEQ ID NO: 24434 - DNA, 275 bp, Glycine max
  Clone ID: 701100815H1
acttgatgtgtcaacatcatcaaggtctcaagaggatgcctagaagactattaggctatatctacattatgatgctgttagccactcccctgacaggtaatgtcgagcaattggcgatattgtcaaacttggggagactcccatgacttctcctggttttccttcttgcaatcctcatgctattcctccaatctttagtgcttgatggtataactgcacttctgaagatatctcagaagatgacaaaaaatgtcgccttcgtaaggcattaggtt

SEQ ID NO: 24435 - DNA, 285 bp, Glycine max
  Clone ID: 701100784H1
aaaaaaaacaaaaacagaaacaaaagatggttcatcagaggcaaaacaacatccatgttcttgttcttccataccctgcccaaggacacatcaacccccttgtccaattcgcaaaaagattagcttcaaagggtgtcaaagccacagttgccaccacccactacactgccaactccatcaatgcacccaacatcacggtcgaagccatctccgatggtttcgaccaagccggcttcgcccagaccaacaacaacgtgcaactcttccttgcctccttcagaacaa

SEQ ID NO: 24436 - DNA, 266 bp, Glycine max
  Clone ID: 701100785H1
cgatttcatcacctccctttcctcttctccaaaatccacagcccaaccatccgtcgccacgtggtggaaaggcactgaaaaatactaccaactcatcaagtcggcaccaaaacccagcctcaccctcgctctcggtgcccaaatcctcgacgagaactactcccttggaaaatcactcaccaccgacaacatcgttagtttagcatccaagggtgctcccaatgacgccatcaacgttgttctaacattctcggacgtaaccgttg

SEQ ID NO: 24437 - DNA, 284 bp, Glycine max
  Clone ID: 701100786H1
tctgcagattgaagccacaggtctgctccttttctttggcttcaatttgtaaaggtttgattttgaagaggaagcatacagtggtattatagtggagatctgggacttgttttgcctcttatgccctatgaggactttcttcaccgcagaatcgtgtaaagaagcacaccatagtgctttgaatccacagtcctggctccaagttgaaagagggaagcttcccagattgtcatcacagtcctcttctgcatcaatagaatccctaatcaaggtcccacagtcat

SEQ ID NO: 24438 - DNA, 284 bp, Glycine max
  Clone ID: 701100787H1
ctttcccgttgaacacacacaggcacaagaaaacccaccaaattatctcgttccgaataatcaagaaaattttgaaaaaaaaaaagagaaaactttattcacacacattcattcatttatcataatggggaagcttctctgtgactcaacctccgtcgccgaaccattccaaggttcgccgccggccgcgcttccgtggcgggaacccaaaccagaacctataggaaccgtagatctcgtcgttccggccaacgtcggtggcgcgccgttcgccggcggtgggt

SEQ ID NO: 24439 - DNA, 272 bp, Glycine max
  Clone ID: 701100789H1
aataataaccccctttttccctctccatacccttttgctttctttatccaataataagaacttcccacgagtggctttaactggtctggtctgctctggtcggacacacaaaaatattagtatggagaaggtgagttttgtgaagaatggagagcttagattgcctccggggtttcgtttcgacccgactgatgaggagctggttttgcagtacctgaagcgcaaggtcttctcctgccctctgccagcctctatcattcctgagggtgatg

SEQ ID NO: 24440 - DNA, 277 bp, Glycine max
  Clone ID: 701100790H1
atttttggctcaatggtgatccaaaagcgaaagatggtggttaaactaatttttggaggtattgatcctaaacacttcaaaggagatcacatttatgtcccagttactaaaaagaagtactggcagattgaaatgggagatttttttattggaggtctctcaacaggtgtttgtgagggtggctgtgctgctattgtggattcaggaacatctttgcttgctggtccaactactgttgtaactgaaatcaatcatgctattggagctgaaggagttc

SEQ ID NO: 24441 - DNA, 276 bp, Glycine max
  Clone ID: 701100791H1
caagtgttggatgcatttctatttctaactaattattgtgcttattattattgttgagaaagaaaagaatggcaaagttactaaaattctttgagttgaacacaggggccaagattccttctgttgggttaggcacttggcaagctgagcctggtgttgtagccaaagctgtcaccacagccattctggtttgatacaggcatattgattgtgctcaagcgtataacaatcaagcagagattggttctgctcttaagaagctttttgatgatggtg

SEQ ID NO: 24442 - DNA, 277 bp, Glycine max
  Clone ID: 701100792H1
accatttgatccaacagacacactccctctctctcttgttcattctctctcagtgctctcgatctccatctgcaacttccttgtctgacagatcctgtgttccggagaaaggaaaggaaaggaaagatgtcggggcaaacgcagcgtctgaacgtggtccccaccgtgacgatgctgggagtggtgaaggcccgattggtcggcgccacgcgcagccacgcgctcctgaagaagaagagcgacgcgctcacggtgcagttccgccagatcctgaaga

SEQ ID NO: 24443 - DNA, 278 bp, Glycine max
  Clone ID: 701100793H1
cagatcttcgtcaagaccctcaccggaaagaccatcacccttgaggtggaaagctctgacaccatcgacaacgtcaaggccaagatccaggacaaggaaggaattcccccggatcagcaacgtctcatcttcgccggaaagcagctcgaggacggccgtaccctcgccgactacaacatccagaaggagtcaacccttcaccttgtccttcgtctccgtggtggcatgcagatcttcgtcaagactctcactggcaaaaccataaccctagaggtcga

SEQ ID NO: 24444 - DNA, 280 bp, Glycine max
  Clone ID: 701100794H1
gaggctgccgccgtcgtcgaggacgtcaagaaaaaccccgacgccgccgtctccggcaccgtcatccgccgccgccttcagctcatgatgtacaacaacatgtaccgcataatgttcgaccggaggttcgagagcgaggaggatcccatcttccagaggctaagagccttgaacggagagaggagtcgcttggcgcagagctttgagtataactatggtgattttattcccatcttgagacccttcttgaagggttacttgaagatttgcaaggaggtga

SEQ ID NO: 24445 - DNA, 277 bp, Glycine max
  Clone ID: 701100795H1
aagaaagattcgaaacgaagaaagaaagcgttgtgaagaatggcggaagagggacaagtgatcggtgtccacagcgtagaggagtggaaggaacatctcaagaagggagaagagtccaagaaattgattgtggtggattttactgcttcttggtgcggtccatgccgtttcattgccccaattcttgcagagtttgctaaaaagttgccgaatgtcaccttcctcaaggtggatgtggatgaattggagactgtttccaaggagtggggaattgagg

SEQ ID NO: 24446 - DNA, 279 bp, Glycine max
  Clone ID: 701100796H1
agttcatcatcgccttcaacgccctgaccttgaagacgatgagaagcaacaagaccaagacaacaaccttaacgatcacgaagggcttgacctaattacaccaaatccaggtcctggtgatgttgttggtcgcaggccaagaggaagacccccaggttcaaagaacaagccaaaaccaccagttatcatcacaagagagagtgcaaacacccttagggctcacatccttgaagttagtactggttgtgacgtctttgaatcggtcgctacctatgcaag

SEQ ID NO: 24447 - DNA, 279 bp, Glycine max
  Clone ID: 701100801H1
ctctgaatatggtgagcaagttgttatgctaggaggaaggatacttgagatattgtccataaatcttgggcttagagaggattttctcctaaatgcatttggtggggaaaatgaccttggtgcttgcttaagggtgaatttctaccctaaatgcccacaacctgacctcactcttggcttgtcccctcactcagaccctggtggcatgaccattcttctccctgatgaaaatgtgtcaggacttcaagtacgcagaggagaagattggatcactgttaa

SEQ ID NO: 24448 - DNA, 277 bp, Glycine max
  Clone ID: 701100803H1
cggtgccctagattttctctatcctttcactcgttcccgaattccctcccgctagggtttcccatggattccgaggacgatatgcacgacgccaacgatgtggagtcccttgacgacgatttctacagtggcgagaccgaggacgctcccatggattactacagtgactacgacgacgaagctgacgattacttcgacgatgctgacgattctgaccgggttgagtctcgccgccctgagcaaaactttacaatattgagggaattggatatccggc

SEQ ID NO: 24449 - DNA, 280 bp, Glycine max
  Clone ID: 701100804H1
gagattattttttcatgcagaaacgagggatcatctaattaaaccagctttcatcagggtgtgggtgatttattgtaagctttttcttattatcttcgattgtgtttacacgtgtgtgttaaaggtggcgaatcctaaagagaagggaaatgaggttgatgacaataaggaattgatattattccatgaagggataatgaacaaccctacattgtcaaggctatttccgggtttgaatagggagagggagatgtctgctatggtctcagctttgacccac

SEQ ID NO: 24450 - DNA, 277 bp, Glycine max
  Clone ID: 701100805H1
cttcactcgtgtatatatcaaataaaacggacttgcccaaggttttcttaattgatgatgttactgttccaactcaagacactaatcagtcatattgggagattacatctgatgaatacctagagtacataaagcaatatgttgtgggaattggaccttggaaggacacagtggtacctgtggtaaaaaattatatgacaaatcctactaatcttgttgccagggcacatgctcataacctgcaggtgcatccatatacttaccgaaatgagttccc

SEQ ID NO: 24451 - DNA, 275 bp, Glycine max
  Clone ID: 701100808H1
ctcgagccggttttggatcctcctttttattccttttttctttacccttttcgtgaggtaaccaacaactcatggcttttacggttccaagaagttaatctgaatgcactcaagaaagaaatgaaggcaaaatttatatagatagcaatggcataaagtgggtggaagttgacatgaggatgggtggccatgttgtagttgacacatgaaaagaccataagaggaattaatcgaagattggtgagagggtagagaaattaaagattttagaacaa

SEQ ID NO: 24452 - DNA, 278 bp, Glycine max
  Clone ID: 701100809H1
gtttctgcgaggcttaacaaacctcgcagaacaaaaaaaaactcactctcacatactttggtttgcaaaaaccctttacttctctattttcttgctagttccttatccaatattatagtacccttttatcccaagttatttaaagttaaaacctttattactactcatatttgttttttgtttgttaaattttaagaaatggaggcacattctccagttatagccaagaagctatggaatgtgttgaggatcactttcttcatgatcaggaagggttt

SEQ ID NO: 24453 - DNA, 134 bp, Glycine max
  Clone ID: 701100810H1
aaattaatcatcttacttatttattctccgaaaatggttgatttacattggaaatcaaagatgccaagttccgacatgccttccaaaactctaaaactctctctctccgacaacaagtccttagcctctttgca

SEQ ID NO: 24454 - DNA, 276 bp, Glycine max
  Clone ID: 701100811H1
gccggcgattccacgtcactctccggctagctcccggcaataacgggcacggcggcaggagtgccttcgagctgggcgcggcggtgcgcggatctgtcctacagcgggaagcttctgatgcagagcgatttggacttgacattgggaaagttggaagctcacgtgatgaagctatctgagatattcaagaagggcgtgtcgatgcatggctactccgtagtagtttcaaggcctggttttggagcttgcaaagatgacatgaggttctacttaagg

SEQ ID NO: 24455 - DNA, 273 bp, Glycine max
  Clone ID: 701100812H1
gagaaaacatggggactattctgctggttcaaattcaactcagactaaattgaaccttggggctacaattcttgcttcgagatttgctgctaacacacgaagaggggctctgaagatgaaagatgacatgccccagttacagaagcctgaagaacctgacttttccactgaagctgacgatgattagttacacttattcagtggcatttggttttcaaattcggttgggtcctgcattctatttcagtatggataatgattctgcaggtcaca

SEQ ID NO: 24456 - DNA, 274 bp, Glycine max
  Clone ID: 701100813H1
ctcctataacaatctctaaatcaagtttgaagccgagaaaataatcatggccggtggtgcaaatttcgtgcaaagggttctctcttacgtggtgaatgaagtggttatcaatggtcttgccaacagccctgcatttcagaggtttgcagtgaggacatcaaaaagaattgaagatatttctaacaaagctgttcagaagaggcaggagctagctgcgcagatcaaggacatctcgaaaaatatggagtcattcaagaacaagtacattttggta

SEQ ID NO: 24457 - DNA, 274 bp, Glycine max
  Clone ID: 701100814H1
gcaaatccttctgttgatgccatcttgcaaacaaaagactcggtccttgacaagctatgggagataaatgtcacagccactatacttcttctgaaggacgcagtgcctcacttgcagaagggttcttctgttgttatcatttcctcaattgcaggttttaacccgccaccttctctggctatgtatggagtgaccaaaacagcccttcttggacttactaaagccctggctgctgagatggccccaaacactcgtgtaaactgtgttgctcctg

SEQ ID NO: 24458 - DNA, 284 bp, Glycine max
  Clone ID: 701100783H1
ctctttcaccaatcaacacaaactaagttcttccttctgttgaaagcgatagccatggccacgaatccaatcgaagcggggaacggcgacgctgctcccaaccctaacgcgactaccaaatcctccgtgtacctgcaagactcggaggagctgaagcgagtcttcagccgcttcgacgccaacggcgacggcaagatctccgtctcggagttggacaacgtcctccgctccctcggatccggcgtcccgccggaggagctccagcgtgtcatggaagaccttga

SEQ ID NO: 24459 - DNA, 278 bp, Glycine max
  unsure at all n locations
  Clone ID: 701100748H1
ctcctctcacattctccttcttcttcatccttatctcttacatttcttcatcatcaggtaaaaacatctcccacttctcttctttgagtttgtatttgaatttcgtcttaccaacatgaactctagttgtaattagaaaataacacttatgaaactgcatgtanattttgttgcttcatctcattatgcatttgaaagttgtcaactttctgacgggctttgcagaagcgggatcaatcggaataaactatggaagaattgcgaacgacctacctaca

SEQ ID NO: 24460 - DNA, 282 bp, Glycine max
  Clone ID: 701100749H1
tgagattttgcattatcttttatcatgttcaattaattgtatgtactttccactttattattcatcacaatgttaacacttttttatcgttcaaccaggtgaccttgaaagtgatttcattggaagcaattgataccagttgacatttgaagcagcttgtacttcattcagttatgacttgttttcctttattattcagtaagtcgtcgtcttcttctgcgagacacgaaccagaaattgatgaaggcattcataatgttaaactctactcctacaaagagc

SEQ ID NO: 24461 - DNA, 282 bp, Glycine max
  Clone ID: 701100750H1
tccattttcaagctctcaacgccatctccagctgcttccttatcataagcgcttcgccccagagattctcgcttcctctccttcaatccttcttccaacgctattaattacacaattaacctctccgcttccctccgatccattcactccctccctcttaaaacctccttgcggatcaaatgctcccaaacagatgggaatggaagtcctgcaaagaggacagtgcttcatgatctttatgagaaagaagggcagagtccatggtatgataatctctgcaga

SEQ ID NO: 24462 - DNA, 281 bp, Glycine max
  Clone ID: 701100751H1
gttttgcaaaattatgctggaattttgatgcccaatactgagcaaccattccgtctgaactgggcaacatttagcacaggagacaagggttcagataatgttcctgacctttctatttttgtaggagatttagctgcagatgttacagatagtttgttgcatgaaacttttgctagtgtatatccttctgttaaagctgcaaaagttgtttttgatgccaatactggccgttcaaagggctatggtttcgtcaggtttggagatgacaatcagagaaccca

SEQ ID NO: 24463 - DNA, 281 bp, Glycine max
  Clone ID: 701100752H1
gtgaacgtcaagaatttgaagcaggatgttcactccattcccgattcgcccattctcgacacgacgtcgtcgtttgggtccacctcttcgtcgccttcgcttgcgaacttgccgccgattagggttcatgttgtggaggatcagaaggtgttggggattgaggagcagttcgcgcagatgggggttggtgtggggcagaaggctcagcagcaggatgagggttttgttttgctatcttcgccgcctcccccgccggttcccgcgaccctcgccgccgtggg

SEQ ID NO: 24464 - DNA, 91 bp, Glycine max
  Clone ID: 701100753H1
agaacttaagaaacgcatgaatagaggtgttttgcaaagctcaccggtgaaacaaatgatggccgtgaaccctaacaattggtggaacatc

SEQ ID NO: 24465 - DNA, 283 bp, Glycine max
  Clone ID: 701100755H1
ttcgctacgaatttattttcaaaaaccttctcttttctcaattgggtttccatctttgatttgatttcattgccatggctccaaaggatcccaagcaagttgctgatgctgcttcttctggtggtggtggtggcttttttgcttctattgcttccagcttgtccaatttcggtagtgccatgtccaaatccgttaatggtttggtgggctacgaggggctggaggttgttaatccagatggaggaactgaagatgctgaagaggaagcaagaaagggacgatg

SEQ ID NO: 24466 - DNA, 274 bp, Glycine max
  Clone ID: 701100761H1
tgataaggcactacggatcttcagaaggtgtggctgttaatgatggtgcattgttttttgaccctattactgagatgcctgatcatgtaaagaatcggaagacatctaaagtgccctttcatgtcgcgttaacggcgacggatgctccatataacaaatggcagtgccgcgtcatgtattactggtataaacaacaaaagaagttacctgggtctgagatgggaggattcacgaggattctacattctggaaatcctgacaacttgatggatga

SEQ ID NO: 24467 - DNA, 235 bp, Glycine max
  unsure at all n locations
  Clone ID: 701100762H1
aaatggaagacgtgataacagaagcagcacccccatcaaggttcctggaagaagacctaaacatcttcacacccccatccccagctctccccaaacctttcctcatcttcccacacaacatacgagggggcnngnncngtcnnctcatcancgnccnggccccctcctccctcgctcgctgcaacgagaccctaaccgctaacgctgaggccactcgcctccggatgtctcccgg

SEQ ID NO: 24468 - DNA, 280 bp, Glycine max
  unsure at all n locations
  Clone ID: 701100763H1
cttttctcttctctgtttttccactccttctccacaatacncnatnttttgnccaatatnannctgcctaagcagnnncnttcaaatnnccttttacattttccaatttctttattctatcaaaagggttaatttgaattttgaaggaaaggacgatagatatgctgacgaaccaaaatgtggtgactcatgaggttattaacacgctgattgccatggcagcttccatttcaaactcaaccgtgttgccaagtgcaacagtaccagaatccatggctgt

SEQ ID NO: 24469 - DNA, 272 bp, Glycine max
  Clone ID: 701100764H1
ggcgttccaatccgcgtcctgacagacgtaacgtcacggagcctcatcggcgacaagtacgtgataggccgggagctaggtcgcggtgagttcgggataacgtacctctgcacggaccgcgagatcaagcaggaactcgcgtgcaagtcgatctcgaagcggaagctgaggaccgcgatcgacgtggaggacgtgcggcgcgaggtggcgatcatgtccaccttaccggagcacgctaacgtggtgaagctgaaggcgacttacgaggacga

SEQ ID NO: 24470 - DNA, 278 bp, Glycine max
  Clone ID: 701100765H1
atcgagccgcgcgagtacaccagtgatatcattaagactttgaacgacaacgggtatgaatatacatggggtactgtcacagtgaagcttgctgaagcctatggattctgttggggagtcgagagggctgttcaaattgcttatgaggcgagaaaacagtttcctactgagacaatttggattaccaatgaaatcatccacaaccccactgttaataagcggctagaggagatgaatgttcaaaatattcctctggaagaaagtggaaaacaatttga

SEQ ID NO: 24471 - DNA, 290 bp, Glycine max
  unsure at all n locations
  Clone ID: 701100768H1
gcaaacatggcatcttcaccaaccttacatacccttgtctctctcatctctcttcctcttgccactctccacttatcacctcttnattctnnctccnnctctccgtggagaaccccgaagatgacgtcatagtctcgtcgccgaagggaaccttcaccgcagggttcagccccgtgggggagaacgcgtactgcttcgcgatatcgttctccacgcaagcgacgacatagaccgttgtgtggattgcgaaccgcgatcaaccggttaacgggaaactgtccacgctttcg

SEQ ID NO: 24472 - DNA, 279 bp, Glycine max
  Clone ID: 701100770H1
gtaccctacacttagttgttgtgttgctgtgcacccggtgagcggtgacctcttccgctttgatcttcttctgtccagggtaaccaatctggttacttgggtcaaagatttctggcatctctgtcatggcaactagacttcagtttgagaataattgtgaagttggagtcttctcaaaacttaccaatgcctattgtttggttgctattggaggttccgaaaacttctacagtgcatttgaggctgagttagcagatgttatccctgtggtcaagacct

SEQ ID NO: 24473 - DNA, 279 bp, Glycine max
  unsure at all n locations
  Clone ID: 701100771H1
aactgaaccagatcatcacacacacatactactctccaanaattcttctanaatggatctcctccttctggaaaagaccctcataggtctcttcctcgctgcggtggtcgccatcgccgtctccaccctccgcggccggttattcaagctcccaccgggcccactccccgtcccaatcttcggcaactggctccaagtcggcgacgacctcaaccgccgctacctcaccgatttggacgaataattcggcgacatcttcctcctccgcatggggcagcg

SEQ ID NO: 24474 - DNA, 280 bp, Glycine max
  Clone ID: 701100772H1
aatgcctgccttgcctcatagtggtagttcttcgaagcctttaatgatgtttagcacagatggcactggaacccttacgtcaccatctaaccagttggctgatgtggatcgctttgtggaggatggatctctagatgaaaatgttgagtcttttttgtcccatgatgacacggaccctagagatactgttggccgttgtatggatgtaagcaaaggcttcacattttctgatgtaaattctgtacgggcaagcacaagcaaagtttcctgttgccatttc

SEQ ID NO: 24475 - DNA, 277 bp, Glycine max
  Clone ID: 701100774H1
ctgagctgagaaaacccccaaccccaacctcaaccttaacctctactcactttcttttcaaccagaactatgattaagctttttaaagtaaaggaaaaacagagagaactggcacatcatgcgagtggcggaccacccgttaagaagcaaagtaccggcgagttgcgtcttcacaaagatataagcgagctgaatctaccaaaatcatgtaccatgcaattccccaatggcaaagatgacctgatgaactttgaagtttcaattcgacctgatgatg

SEQ ID NO: 24476 - DNA, 277 bp, Glycine max
  Clone ID: 701100775H1
ctcgagccgtcacaaccgaaacagtttccatctctctcacaaaatcacaacaatatcaaatcgctcccttctcttcctcttcctcttcctctccaccctccacatagcttccaccctctcaacccccaccaacttcatcaagtcctcctgcagcaccacccagtacccagccctctgcatccagtccctctccgtctacgcctccaccatccagcaagacccccacgagctcgtccagacagccctctccctctccctcaaccacaccgaggccacc

SEQ ID NO: 24477 - DNA, 279 bp, Glycine max
  Clone ID: 701100777H1
aaaaaaaacaaaaacagaaacaaaagatggatcatcagaggcaaaacaacatccatgttcttgctcttccatactctgcccaagctaccctcaacccccttgtccaattcgcaaaaagattagcttcaaagggtgtcaaagccacagttgccaccacccactacactgccaactccatcaatgcacccaacatcacggtcgaagccatctccgatggtttcgaccaagccggcttcgcccagaccaacaacaacgtgcaactcttccttgcctccttca

SEQ ID NO: 24478 - DNA, 79 bp, Glycine max
  Clone ID: 701100779H1
accggaccagcaacgtctcatcttcgccggaaagcagctcgaggacggccggaacctcgccgactacaacatccaagag

SEQ ID NO: 24479 - DNA, 272 bp, Glycine max
  Clone ID: 701100780H1
ctctctcaccaaagccttcctagaacgaaaataaaaagaagagcaattttccctcaccaaagaagaagaagcaaacaatggccgatcaacttaccgatgaacagatctccgagttcaaggaagccttcagcttgttcgacaaggacggcgatggttgcatcacaaccaaggagcttggaactgttatgcgttcattggggcaaaacccaactgaggcagagctccaggacatgatcaatgaagtggatgctgatgggaatggtaccattgac

SEQ ID NO: 24480 - DNA, 278 bp, Glycine max
  Clone ID: 701100781H1
cttctctctctgcgtcaaacacacctaccttccagtttgagctacggccatggcgtctttaccttcgggtcgcagcaacggtggttccaacggctttgatttgggttccggtgacatcctttattcgtacgacgaggaggactataccaaccacgattcttctaacggcactcacatcgatcccaccaaggattctcatgcatcaaggatgggaagaacatcaatagttcctgctactgcctatagtccgtctgaagattctttgagccaggatgtga

SEQ ID NO: 24481 - DNA, 280 bp, Glycine max
  Clone ID: 701100782H1
ggaaaggatcacgccttggacatgattcacttgttgatgggatgttgaaagatggtttgtgggatgtctataaggatgttggcatgggagtgtgtgctgagctatgtgcagataaccatgcattaacaagagacgaccaggataactatgcaattcagagttttgaacgtggaattgctgcccaagaaagtggtgccttttcatgggaaattgctccagttgaagtctctggtggaagaggaagaccatcaacagttgttgataaggatgaaggcctagg

SEQ ID NO: 24482 - DNA, 280 bp, Glycine max
  Clone ID: 701100747H1
ataattttctattccccaaatctcctccttagactgccaacccaatatagccattggatcgaattcagtttggattcggtctgatggtttgggagttctaataagtctaaggaacagaaattctgtacatatatatttagaagatcacaggtgcttgatcagtggtgtatcaatatggacaaggtgatgaggctggcctctgaaaagggtgtggtgattttcacaaagagttcttgttgcctctgctatgcagttaacattctgtttcaagaacttgggg

SEQ ID NO: 24483 - DNA, 286 bp, Glycine max
  Clone ID: 701100718H1
aattgctaacggttttttctcgtttttcatggccgtgggcaacgtgctaggttacgcagcagggtcctacaaaggtctccacaagatgtttcccttcacggagaccaaggcctgcgacgtgttctgcgcaaatctcaagagctgcttctttttctcaatcctcttgctgctgtttttagcaacggttgctctgctctacgtaaaggacaagcaagtggaagcacgggccttggatgacgccacgcaaccctcgtgcttctttcagcttttcggtgctctgaaagag

SEQ ID NO: 24484 - DNA, 288 bp, Glycine max
  Clone ID: 701100722H1
ggcggattgcctgtacttcgaggcttccgactcggtgccccggctgcacacgacggactcgagctgctccgagcaggcggtgtcggcggagtttgcgagcgaggtgcagagcgagccgaagaggggcagcaacaacaacaacgagtttgcatataattacgtggatgccactctcgggaataatcagatgtcgccgctgcaggatattttcatgtacctctccaagtccttctgcaattaacacgcaccaccaccacgacgagacgacgtcgttctgtgttgtgtgta

SEQ ID NO: 24485 - DNA, 283 bp, Glycine max
  Clone ID: 701100723H1
ctcagaacctgattaaggagagtatggcacagtttagtggcaaaactttggtgcagtggttggtagcaacactgctgattgccttgttgggtggtgcacaagctgttgtgttatgtaacatcgactcaagtcaactaaacttgtgtcgtgctgcagttactggtcaaaaccctccaccaccagatgagaaatgttgtgcagttattcgccaagccaatttaccttgcctctgcagatacaagtctattcttcctttaattggaataaaacccgaaaaggcttt

SEQ ID NO: 24486 - DNA, 288 bp, Glycine max
  Clone ID: 701100724H1
gtttctgcaatggaaatgcaagccatcttaacagcattggttatggaagcaactgtggaagtagcagcaatgttgatcaagttaacactgtctgggcagcttcagagggcaagcataaagacctcacaagcaatgcaaactctcatcgatctatccaaagagaagcagctctaaacaaattccgcttgaaaaggaaagagagatgctatgagaagaaggttcgatatgagagcagaaagaaactagcagagcagcgtcccagagtgaaaggacaatttgtgcgtcaag

SEQ ID NO: 24487 - DNA, 283 bp, Glycine max
  Clone ID: 701100725H1
gccgagtgcagcctcctcgccggcgacgacgacaccgagtatctgatggagtcggagagcaaccggcgcattctagcacaaaggagctacataagctacggtgcgctgagaaggaacactgtcccttgctcccgacgtggcgcctcctactacaattgccgccctggcgctcaggccaacccctacagccgtggatgcagtgctatcacccgatgcaggcgttgaaaaagttattcttctcttttaatttcatttttttttatatatatatatctttgcaatt

SEQ ID NO: 24488 - DNA, 104 bp, Glycine max
  Clone ID: 701100726H1
aaaattctcttccgtttcaggattagggtttcaccgttacagtgactaatggcaaaaccacagcgaatctctctgcgtatctttgcgctgctcctcttgatttc

SEQ ID NO: 24489 - DNA, 280 bp, Glycine max
  Clone ID: 701100727H1
cgcggccggttcgtgccgcgcgcggttctcatggacctcgaaccgggcaccatggacagcgtccggtccgggccgtacgggcagatcttcaggcccgacaactttgtgttcgggcagtccggggcaggaaacaactgggccaaggggcactacactgagggtgctgaactcattgattctgttctcgatgtggtgcgcaaggaggctgagaactgcgattgcttgcaaggttttcaagtgtgccattctctgggaggaggaactggatcaggaatgggta

SEQ ID NO: 24490 - DNA, 280 bp, Glycine max
  Clone ID: 701100729H1
cggctcgagtgaatgaaacggccgtggaatattatgcagccaaaattgttgagtactattacattgctgaaagccccaacacaatttattgatttgtgcacccctgtgattactaaagctttatattgagaaatgacaactatatgtgccacataacatgatccggtaactatatataccaaatttggtctctgttgcaagaagtcaagaactagagaaagcaacattgatatctatctgcttgggaccatattatgcaaaattttcgaacttgctcaaa

SEQ ID NO: 24491 - DNA, 244 bp, Glycine max
  Clone ID: 701100730H1
tgtccttggccgtgggctgcgaactgttggtcttcggtcgttaattgatggagtttgccatttggaagtatagcatgatttgtcgtggttgggtgaagtgccaggagatgaaccaaccccgttgtttgtctggatctagtagtcttggttcgattgctattgttgctgggggaagtgataagtatggacatgttctaaaatcagctgagttgtatgactcttcaacaggtatgtgggaacttta

SEQ ID NO: 24492 - DNA, 285 bp, Glycine max
  Clone ID: 701100731H1
tcaagactttgacatcgcgtctttgtcttctcatcttgaacatgaacattctctgtgaatcaagagtcacgatttgtcctatatgctccgttaaagttgcacgggacatgttaaatcacataacgctgcaacatgggcatttatttaagttacagagaaggcgcaggttaagaagagtcgctattccaaacagtcagacattgtcacttttgggtcgagatcttcgtgaggctcatctacaggtgcttcttggtggtggtggtggatatcggtcaaacagtgcag

SEQ ID NO: 24493 - DNA, 266 bp, Glycine max
  Clone ID: 701100732H1
caagaagaaaaaaccgacacaaagatctagtcctagctagaatcaaacaggggcgatctcaccttcaagaacacatcgccatgggaaggtaattgcatcgtgtgctttttgcagtagccaccctcctccatggctcagcaggccaaagcagacacatggtcggtgatgccacgggctggatcatccctgctggcggagctggggcctacaccgcctgggcttccatcaaagccttcatcgttgacgtcactctcgtgttcaacttc

SEQ ID NO: 24494 - DNA, 284 bp, Glycine max
  Clone ID: 701100733H1
cacccaccgtagtcaccaaccatggatgtcaatttggcccacatcaatagttattttctccgtaatgtggctcatgagggtgaatgccattgacccttgtgcctctcaaccggataattcggacctcaacgtgattcccatctacagcaaatgctcaccgttcaaaccacccaaggcagacacatgggacaacagaattataaacatggcctcaaaagacccagtccgagtgaaatacttgtccaccttagtgagtcaaaagacagtctccacggccccaatcg

SEQ ID NO: 24495 - DNA, 284 bp, Glycine max
  Clone ID: 701100734H1
cttgatcttgatgagatgaaaagagattgtgttcctgtgctgtcgatgattggttaattacatcatgggttttttattttgatttgaatatggtttatggtttcctctatcaacaaggtacaaaagctttcgtctaattgtaaaagtggctttcttaccatgaaatggctactcttttctttattctcctgctttgttttcccacctcaaaatattggtatcttttcttgttttccctttccataaatgaaaaaaaaagtttctttgtccaatgattttttttc

SEQ ID NO: 24496 - DNA, 285 bp, Glycine max
  Clone ID: 701100735H1
cagaatcactccaacatttcaaccgaaagaaacctctctctctctctctcccatgcgtttctcaaataaccaaagctattagtttagttgcttccttattttcttcgccagagatcgcaggatgtcgtcgccgaggttcccaggtggtggagcctccgatttctacggcggagaggaggatttcccagtcagttcacggcggttcaacccaccatgaacaaccactccgccaccacaccccgccctctctaccgatcccaaccttcaattctgcttaacccctcg

SEQ ID NO: 24497 - DNA, 284 bp, Glycine max
  Clone ID: 701100736H1
ataggcatgaacaggatttaaagactacagaagcaagtgattgtagtcagcagtcgatgcttgtgacaactccagtagatgctgaagcccgggaaggctttcctgtgcagtctctagatggggttgaaaccaaaacagctgaaaagcgtaagcgcaaaagccgatgggatcaaccagccgaaacaaactcgcattctgatgtcgttatgagctctattggtgaaagccagaacattcatgaggatgttccaccagggttttcgtgtccagtaggttcattaaat

SEQ ID NO: 24498 - DNA, 287 bp, Glycine max
  Clone ID: 701100737H1
ctacgactcgccagcctaatcaatacgccaatacagagagggtgcggtaatgggttgacgtgcgcaactctcttcttcactgttgaatggcgtcaccacccccactctgcttcagaccagagtgcttctctacgacgccgtttctcacctctgccaccgaggagtaatattggtaatcagagcagacaaggacagaaagatcaaattttgttgcgttcagtctgatactgctgagctctatctgagagcttgtagtcttgaacgtgaggatgtcttgcaccgcattc

SEQ ID NO: 24499 - DNA, 285 bp, Glycine max
  Clone ID: 701100739H1
gcaatctgccatatctaaggagacccgcatgggtgcttctctccttcgcttgttcttccacgattgctttgtcaatggatgtgatggttcaattctattggatgacacatcaagcttcaccggagagaagaacgcaaaccccaacaggaactctgctcgtggattcgaggttattgacaacattaaatcagccgtggagaaagtgtgtccaggagttgtttcctgcgcagatatccttgccatcgctgccagagactctgttcagattcttggaggccctacatg

SEQ ID NO: 24500 - DNA, 285 bp, Glycine max
  Clone ID: 701100740H1
ggcgatgcaacccacatccggcggcggcgggctggcaaggttccgttcagctccggcgagctggttagaatcagttctgttgaaggaagaggaagaagaagaagaccccttaagcttcactcaactgctttccactatcgatgatgctccctctcattctcaacaccaactctatggtgccgctctctcaaacaaggataaaacacctgaaatcttcatgttagaagattccgttccttgcagagtgagggctaagcgtggctgtgctactcatcccaggagtat

SEQ ID NO: 24501 - DNA, 283 bp, Glycine max
  Clone ID: 701100741H1
cttttcctttctttttctctcattccattcacattctcaacccaccacacaacttccaaccatattctctcgccacttcctcacatggacgcaaacagaaccctagagctcacggttttatcgttggaggagctccacgtggactggaagcacgccgcggagagcctctacgtggtggtacgggcagagtccatcaccagctactccacgggcacggccaccgaaagcggtggcaacccgtcgtggaacgagaagctggtagttgacgtgcccgtgcatgcga

SEQ ID NO: 24502 - DNA, 280 bp, Glycine max
  Clone ID: 701100743H1
gagggagtagcggcattaaaaatgcagatcttcgtgaaaactctgacagggaagactataaccctcgaggtcgagagcagcgacaccatcgacaatgtcaaggccaagattcaagacaaggaaggcattcctccggatcagcagcgtttgattttcgccggaaagcagcttgaagatggaaggaccctggccgattacaacatccagaaggaatcaacccttcatctcgtcctcaggcttcgtggtggcatcattgagccttccctcatggctttggctc

SEQ ID NO: 24503 - DNA, 279 bp, Glycine max
  Clone ID: 701100744H1
caaccccaatttcccaaccactactataaacaccacaaactcctctcctctcttttcttgtatccacatctccaacggaatcaagaacagccaagaaatcagagaaaaaaaaaatgccaccttttgccggatccgaaccagttggattccctaagccagattccttcatagtttccattgacgttggtgggtaactgttccaaaccacgaaacagacactaacctcggcgggtccgaaaaccttcttctccagaattgcggcggaatcttctggactcc

SEQ ID NO: 24504 - DNA, 269 bp, Glycine max
  Clone ID: 701100745H1
ggcttacctaggctccacagttcagaatgcctgtgtcaccgtccctgcttacttcaatgattctcagcgtcaagataccacagacgtcggtgtcattgccggtctaaatgtgatgcgaattatcaatgatcctactgcagctgccattgcatatggtcttgataagaaggccacgagtgttggtgagaagaatgtggtgatctttgaccttggtggtgggacagttgatgtgtcgttactcaccattgaggacggtatctttgaggtga

SEQ ID NO: 24505 - DNA, 287 bp, Glycine max
  Clone ID: 701100717H1
aaaaaagtcgtttttttattttttttattttcaaccatggctggtgtgaaccccgaggcaggagggtggcaggcttatccttctgttatggagactgctcttgatagtggtgatggaaggagtcatcataacatgagtgatgatgggtcagtggcagtgccatcatctggacagaataaagtgattcctagtccaactcagtttagcatcctctataaggggaaaatgtgtatctatgaaggaattcctgcagaaaaggtgcgtgaaataatgttgattgcttctgt

SEQ ID NO: 24506 - DNA, 276 bp, Glycine max
  Clone ID: 701100686H1
gacaacttcatctaattaaccatgaatcaccaacaacaatctcctgtgactgcatatccagcagtgagtcagagcaacccagcagctccaccaccacctgtgggttatcccacaaaggatgatgttccttcccaacaaaatgttccaacaaaacctctactaggggtgatggcttttggaagggatgttgtgctggattgtgctgttgctgtgccctggattgttgtctctgattgaagttatggatttgggcttatcctctctgtcctttgtcat

SEQ ID NO: 24507 - DNA, 280 bp, Glycine max
  Clone ID: 701100688H1
gaccaatctcatctcttcttctttatgttctctttccttcttttgttttctgccatggaagacgagccatttctcactaccacttcccaacccatcgccgattgccttcttccatcttccaagtccttcaacgacgtcaccaccacacgcgcgcgtgacgtcgccgccgccgccgccgaggagattcaatccgaacaacaacaacctcccaagaagaaaaaactgagccgctgcaagacggcacctgcgatggtcaccatgcgagacctcaaacctaaga

SEQ ID NO: 24508 - DNA, 252 bp, Glycine max
  Clone ID: 701100690H1
gtgtataccgttttgctgcttgagataatgatgattcttttgcttgtttattattattacatggtattgaagtaagtcactggtcattgtttgttgaagagtctttgtatgtaaaagatgtattggccctttcaacagatatatgattatagtctgcacagggttagatcctgaatttgtaacccccaattccatactttaattgccaaataagatattgaataataaaattagaacattcttttgtagcat

SEQ ID NO: 24509 - DNA, 268 bp, Glycine max
  unsure at all n locations
  Clone ID: 701100691H1
cttaaacaacacaagcttgttgaaaattttcacgttgttccagcagtgagaacaacaacctctcttcccctcacattccttgatttgcctttagcaggtcctatttatgtgagacgccaattcttctatcacttccccaattccacactccatttctgccaaancatacttccttgtctcaaaacctctctctctcaaacccttcaacacttcttccctctcgctggaaatctcatctgtccaccaacgacccacaaacccttcattc

SEQ ID NO: 24510 - DNA, 265 bp, Glycine max
  Clone ID: 701100692H1
cccataacatgatccaacaacaacaacaaagtgctccaagactcttcagaaacattggtgacttcatggtgccttctcaaggagactcatcttcagccacagaagaagcccccacctccacaactacaagtgtaaccgctgtggcacaacggttactgaaaccccacccccaccgggaggtggggaaaggaggagaaagtacaggggagtgaggcagaggccatggggaaaatgggcagcagaaattcgtgatccacacaaagca

SEQ ID NO: 24511 - DNA, 277 bp, Glycine max
  Clone ID: 701100694H1
ccctcgagccgattcggctcgagcaatttctctctttctttttgtgaccaaaatggctcctagctctactcacaatactgggccctatgtgcttatgctagttgggatagtgattagcactatggttgctacctgtgctggtagcttctaccaagactttgatctaacatggggtggtgaccgtgctaagatattcaatggtggccagcttctatctctttcccttgacaaagtctctggctctggcttcaaatcaaagaaagaatacctatttggg

SEQ ID NO: 24512 - DNA, 263 bp, Glycine max
  Clone ID: 701100695H1
cgacaagctcagtagcgtcgaactcgtccgcggaatcaagaagaggatcgtcctcaagagcctagggctcagtacctcgcccttgtcctcctcgacacccttgtcaagaactgcgagaaggccttctccgaagtcgccgacgagtcgttcctcgacgagatggtcaggctcatcgatgacgctcagaccgtcgtcaacatacgcaacaaggccctcatgatgatcgaagcctggcgtgagtccaccggcgagttgcgctatct

SEQ ID NO: 24513 - DNA, 226 bp, Glycine max
  Clone ID: 701100696H1
ctcgagcagcggctgtagtactttcacaattcatagggtcgaatcagcgttatcgacggacagtgttccgcacgtaaaggggctgcagagcaccgtgccgtcgatgtcagttgaatgcgtcagcagacttccaactcgatatcggatcgccgagagtcagtagtacggcgtaatgcgaagtactcgattctgcttccatgcagatgttgcactgtgtgcggcggca

SEQ ID NO: 24514 - DNA, 288 bp, Glycine max
  Clone ID: 701100701H1
cgaatccaaaaagaaagatcaaaaggcttcttcttcttcttcttctgctgctgctgctgctgctgctgctgctgcggattctaaactcaaggcctccaattttcctggaaccattttgaaaattgggacttgggagtataagtctagatatgaaggagacttggtggcaaagtgttactttgcaaagcataagctggtgtgggaagtccttgatggttgtcttaagaataagattgaaatcccatggtctgatatcatggctatcgacgctaactaccctgaggatgg

SEQ ID NO: 24515 - DNA, 286 bp, Glycine max
  Clone ID: 701100702H1
taggagcacaggacctaagctcatttggcgaaggtgttccctgctttggaagcccttgaagatggtttgccaaatgagttgttgggacaggagggacccacaggacctaagctcaaaagaaattggcaaggtgatgaggtttgaaatggaagagcccgagaatggtggcattattgacaccatgcaattaaaaaaggagactttaatttggttggtttgcactatctgttttgtattgttatagggttcacaacaaacatgtatttcttaataataactgacaaag

SEQ ID NO: 24516 - DNA, 286 bp, Glycine max
  Clone ID: 701100703H1
ctttcaaagagacgaagccttcgaatctctctgaaacttttctactctctttgattcttctctatcagttaaacattagaatgagccgttcacaggatccacacccttcccgatctctcttcccttttggaaatccttttcggatgatatcacctaaaggctctcgcatgtctccacaacttcttgcagtgttgcaagcttttgaggcaacattggcagagaggctgaaaaatcttatgcctaaaagcaaggatgaaatcctcaccttgtcttggatgactttagc

SEQ ID NO: 24517 - DNA, 284 bp, Glycine max
  Clone ID: 701100704H1
aggctagtacacaaaatggcaacaagaagcttgatgctgcatatcaggaggcacagcagaaacctggcggcacccctgttttgctctttgtctcagttaataccagtgggcaatttgtggggcttgctgagatgattggtcctgttgattttaacaagagtgttgattattggcatcaagacaagtggaatcggtgctttcctcgtaagtggcacattgttaaggatgttcctaacaatttgttgaggcacattaccgtggacaacgatggtgaacaaacctgt

SEQ ID NO: 24518 - DNA, 287 bp, Glycine max
  Clone ID: 701100706H1
gcttcgtggtggcatgcaaatctttgttaagactttgaccggaaaaacaataactttagaagttgaaagttctgataccatcgataacgtgaaggcaaagatacaggacaaagaggggattccaccagaccagcagaggcttatctttgctgggaagcagctggaagatggtcgtactcttgctgattataatatccagaaggagtccactctgcatttggtgttgaggcttcgtggaggtatgcagatatttgtgaagactctgacagggaagaccattaccttgg

SEQ ID NO: 24519 - DNA, 288 bp, Glycine max
  Clone ID: 701100707H1
ccgtgctgaagcagtatatgcagggtcgaaaacaactgccaaaccagaaggaacaagacctacaaacaagactggcttccttggacttgttggtaaaaaggtggataccatagaatattgcaacgagaagattaatgaacttgaggccagattggaatctgagcaagaggtcactctcagagagaagcagcaagatgctgctgtagtacttttctcaagtagggtggttgcagcatctgcatctcagagtttacatgctcaaatggttgacacttggtcagtctttga

SEQ ID NO: 24520 - DNA, 285 bp, Glycine max
  Clone ID: 701100708H1
aatcgctgcccacagtgcaagggagagaaggttgtgcaggagaagaaagtccttgaagttattgtagaaaaggggatgcagaatgggcagaagataacattccctggcgaagtgatgaagcgccggacacaattactggggatatcgtctttgtccttcagcagaaggaacatcccaaattcaaaagaaaggctgaagatctttttgtagagcacactttgtcccttaccgaggccttgtgtggcttccaatttgtgctgactcacttggatagccgtcagcttc

SEQ ID NO: 24521 - DNA, 285 bp, Glycine max
  Clone ID: 701100709H1
caaagaacttccttataaccaaaaccaacaacaactatggcaagttatcagaagcactacgatgatcagggtcgcaaggtcgacgagtatggcaatgttgagaggcaaactgacgaatatggcaacccggttcatgccactagtgtcacttatgtagccaccaaaagtgttggtggctacaatgatgacgctaataagcaacatgatattactggtgtctatcccgagaaagacaccggtagacatcattttggtcgtggttacgacggtgacactaacaagcaa

SEQ ID NO: 24522 - DNA, 283 bp, Glycine max
  Clone ID: 701100710H1
ttctaagctctactaaaaaaagatacatagaaacaaatcgaaattatttattattattaaagcaacatggctttgtcatggacaaaagggagagtgttccggcgtgccagaaagggtaaggagttgaaatattctggtggcgacatggagatagagattgcgatcccccaccacttcccggtgccggtaaccttggacatgatgaaggaccccgtgaccgttttcacgggcataactatgcacgcgacagcatcgagaagtggatcgagtcccgggaacgcac

SEQ ID NO: 24523 - DNA, 282 bp, Glycine max
  Clone ID: 701100711H1
cacaatttcaaaatggctaggggactaaagaagcatttgaaaaggctcaatgctcctaagcattggatgcttgacaaactgggtggtgcatttgcgcctaaaccctcatctggaccacacaaatcgagggagtgcctccccctcattcttattctgcgaaaccggctgaagtatgctctgacataccgtgaagtcattgctattctgatgcagcgccatgttcttgttgatggcaaagtcaggactgacaagacttaccctgctggtttcatggatgttgtt

SEQ ID NO: 24524 - DNA, 274 bp, Glycine max
  Clone ID: 701100712H1
cttaagcgctcgagctgtgcagctacagatccatctgttctaagtcaattagctgaaaaattgcaattgatgggaatagctgatcttactcaagaatcacttgctttgcatgagatggtggcatcaagtggttaggatccaggagcacgcattgagataatgtcaatgttattgaagaagataaaggatttcgtgcaaatagaaaatctagtcaaggatgataatttaggaggacaaggcattttctcaaaagtctatggacttgggacaaatg

SEQ ID NO: 24525 - DNA, 284 bp, Glycine max
  Clone ID: 701100713H1
cctcgagccgaatcggctcgagattcaccttcttctccttctataccaacctgtttctccgacaatcacattcaacgcttactgtcatggaagaagttaatgtcgtggaaactaaggatggaactgtctcagtagctgctgcgtttgctggtcaccaggaagccgtgcaggatagagaccacaaatttttaagcaaagctgttgaagaagcatataaaggggtagattgtaaagatggaggcccttttggtgccgttatagttcataatgatgaaatagttgct

SEQ ID NO: 24526 - DNA, 282 bp, Glycine max
  Clone ID: 701100715H1
caaacaaataaagcaaaaggcctttttattccaaagcaaggaaggaagaaataaaccgaatgagagcattaacctcttcttcttccactttcattccaaagcgttattccttcttcttcttcctctccattctcttcgctcttcgatcctcgtccgggggctgctccgaataccaccaccaccacgcgccgatggccacgataggaggcttacgcgactcccaaggctctcagaacagcgtccaaaccgaggccctcgctcggttcgccgtcgatgaacaca

SEQ ID NO: 24527 - DNA, 276 bp, Glycine max
  Clone ID: 701100716H1
gatggcaaacgacaatgaaattctgaagtccagggaaatcattgatgacctcaacaagaagcttacaaactgtatgagcacaatagatgctaagaatactgaacttgtaaatctacagacagctcttggacaatattatgctgaaattgaagctaaggaacatttagaaggagatttggctcgtgcaaaggaagaaacatctaagctttctcaactgttgaaagatgcagactgcagagcaaatgtattgatcagtgaaaaagaagacattttagc

SEQ ID NO: 24528 - DNA, 270 bp, Glycine max
  Clone ID: 701100685H1
agaagttctatccatctgagtttggaaatgatgtggaccggactcatgcagttgaaccagccaagtctgcatttgcaacaaaggccaaagttcgccgagctattgaggctgaaggaattcccttcacttatgtgtcaagcaacttcttgctgggtacctccctgcccaacttgtcaaagcctggagccacagctgcccccagagacagagttattatcctaggagatggaaccccaaagctgtttttaacaaggaagaggatattggaac

SEQ ID NO: 24529 - DNA, 276 bp, Glycine max
  Clone ID: 701100656H1
gttgagtacttcggtgaacaattgtcaggctttgccttcaccgttaatgggtgggtgcaatcctatggttcccgttgcgtgaagccaccgatcatctatggtgatgtgagccgcccaaagccaatgaccgtcttctggtcatctctggctcaagctttaccaagcgcccaatgaagggaatgcttaccggtcctgttaccattctcaactggtcctttgttagaaatgaccaacctagatctgagacaactaccagatgctttgtctatcaggacg

SEQ ID NO: 24530 - DNA, 280 bp, Glycine max
  Clone ID: 701100657H1
aagtaacgcaaaaccgaaacgctcaacattcacattgtaaaactcttcatcatagcaattcccttccttttctccctccctctctctcttggcaatccctttcttcttcgctgtcaggtgcaccttctataataacagtaagtcagtggtgggagttatcagaaatagatgaaacagcagttataaatttataatgtctggactgatcgaaggacttcctgacgctgttgcaattaggtgccttgcacgtgttcccttctacctccacccagtgttagag

SEQ ID NO: 24531 - DNA, 280 bp, Glycine max
  Clone ID: 701100658H1
ctcgagccgtgatgatgaccttgatctctttggcgatgagactgaggaagacaaaaaggcagcagaggaaagggaggctgctaagaagtctaccaagaagaaagagagtggcaaatcttctgttctgcttgacgttaagccttgggatgataaacagacatgaagaagctggaagaggctgttcgcagtgttgagatgcctggtctattgtggggagcatccaaactggttcctgttggttatgggatcaagaagttgcagatcatgttaactattgtcg

SEQ ID NO: 24532 - DNA, 274 bp, Glycine max
  Clone ID: 701100659H1
gatcaattggccgccaccgtcaagaagttaagtcgagactttgccaagttggagacatttaagaaacaactgatgcagtcgctaactgatgacaatgcatcgcatgctgaaaccatagatattggaacctgtgatcaatcagttccaaaggcatatcctgataacgatgatgatggaagtggctatatggtacatcattcatacaatggccctgcagatgtgggtaaaacaaatgatgaagcttccaggtattcagggcaaaggttttctttga

SEQ ID NO: 24533 - DNA, 267 bp, Glycine max
  Clone ID: 701100660H1
caactgtgcaagggagtgttgccattgatggcaaggctgtgattggcaccattgatgaggattttgtgtgtgcaactttggattggtggcctcctgagaaatgtgactatgggagatgcagttggggccttgcttctcttctcaatctggacctcaacaacaagatttttttaaatgctgtgaaagcattttcaccgttgaaacttagattaagtggaagtttgcaagccaagctaatatatgggcctgaagttaatccccaacctt

SEQ ID NO: 24534 - DNA, 282 bp, Glycine max
  Clone ID: 701100661H1
gtcacacacggaaggtccgaaaatctataccatagcaatacctccttctagcattggtcagaaatttggacaactgctggaaagtggtaaaggcagtgatgtaaattttgaagttaatggtgatatttttgctgcacataaattggtactacagctcgttcacctgttttcagagcacagctttttggtcctcatgaaagatcagaatacccagcgtattaaagttgaagacatggaggctccagttttcaaggcattgcttcattttatatactgggactc

SEQ ID NO: 24535 - DNA, 282 bp, Glycine max
  Clone ID: 701100662H1
ccggtaccccgagaaacacgcgtgtggcttcgatttcaaggcggtggggagagaggagatagcacgggcgaatcccgtgatcaaaggcgagaagctacggaggatttaatctgcaccgttgatatgatgatcgaagcgattagggtgagttgatcaggaccgtccgtcgtgggccgttgatacgaacctatttcgagcgtgtgtaagacaaaaaaaatctattagttatgacgacattgggaagggttgaataagtcatattttggaggctttgctttgtgt

SEQ ID NO: 24536 - DNA, 284 bp, Glycine max
  Clone ID: 701100664H1
atcacgaatgaaaaagatgaccctgaaaatgcatgctcccctgacaggtctagccaagaagttgttaaatctgctgaagtggagcatgataaagaggaaatgggggcacagataaaagagattctatcggtttgtcctactgaagaaagtttcagtagcatatagcatattttctccagcatttcatacccgtgttcttatatacagtcttccaagtgagtgtttctacagtacttggcagattttgattgtagtaatagtcctgtgatcgtcatagaccgttt

SEQ ID NO: 24537 - DNA, 275 bp, Glycine max
  Clone ID: 701100666H1
cggctcgaggtgtgtccaaccatcaatctttcattgattatacgggttctctgtaacttcactccggatgagttctgtccagatcctgttccaggaactgtcttggaggccctgaatgcagagactattatagagcgaagattgtcagcagaatctgcaagaagctttccctatgtggctgagcccgttgtgtatatggctccctcttctgctaatgtggcagagaaagttgcagaggctgcaggaaagtctcacttggcaagacatgtatcagc

SEQ ID NO: 24538 - DNA, 271 bp, Glycine max
  Clone ID: 701100667H1
gcagtggtgactgaagatggccagcagattgcctatgactatcttgttattgccactggacacacagaaccaatccccaaaaccaggagtgaaagacttgaccaatacaaaggagaaaatgcaaagatcaaatctgcaagttcagtttgattgttgggggaggtccaactggtgttgagcttgcagcagagattgctgttgattttcctgataagaaggtcaccatagtgcataaaggaacgaggttgcttgaatacattgggacaaaagc

SEQ ID NO: 24539 - DNA, 274 bp, Glycine max
  Clone ID: 701100668H1
ccctcgagccgaatcggctcgagcatcaaacaaggtgccatcatgagcagaaatataggcaataatggatttgtggttcccacagcttcaattttcactcttgcagccgttgggatgatactttcagtgaccatctatgacaagctcctgtgccagtgctaagaaaactaacaggaaatgacagaggaatcagcatcctccaaaggattggtattggaatggtcttctcagtcatcacaatgatagtggcagctttggtggaaaaaacgaggct

SEQ ID NO: 24540 - DNA, 275 bp, Glycine max
  Clone ID: 701100669H1
ccaccaccactccctcactctccactccctcaattcacaatcctcacgttgcctcgttcacatgaaactcctctcgccctccgtgttctcgctctctctctgaatcactcatccttataataaataaataatttctcgaagaaggagaagaggttttcattgttgtggttgttgtagaagaagaagaagctgaagaagaatggagtccacagaatcttcatacccgtcttctcccgagggaccgaggaagcacgctgcatcgcctcctccgaaat

SEQ ID NO: 24541 - DNA, 276 bp, Glycine max
  Clone ID: 701100670H1
gcagaccagttagggtcagtctctgtaacaaatgaggtcctggagaggagtcaattaacaagagattatgttctggaaccaattattatgaattccaacatcaaaattccactggtgatccaagacctaattaagagcacttcggagggattatagaaaggctgtagacctattcaatcttcagagggatcaggaggagcttatctcatgcaagattcttctggcttgaagtatgtgtctgttttcaagcccatagatgaggagccaatggcaata

SEQ ID NO: 24542 - DNA, 279 bp, Glycine max
  Clone ID: 701100671H1
gtgattttttttctttgttagactctttgctggtattttatgattagaggcagtcttaaaggaatctcaaaatttaagaaaatatagttcatgtaggcatgataagtagcagaggcagaagaatgtttttttatttgttttgtgaaagatttggtgtctagaagtagaaactgagagaaaggccttgtataaggatccttacacgcatgaaatgaattttgagctctagcttctaggcatagatattcttaattcttagtttaaactttgtatgtatca

SEQ ID NO: 24543 - DNA, 281 bp, Glycine max
  Clone ID: 701100672H1
caaaaagggccagaaacttctcggtcgcatcatcgcgttcagcttcagccatggcggcctagcctaattaattcaaaagtcaaaaccctaaatcccaacccatcaattttcctctctcttcactttaccaatccaaatggcctctagactcccctccgcttcagatcccatctcctccgcaccgcctccctccttcaaaccttgccgccggcgcccctctccctccaccgcctcctctccacttcccgccgcgcgcctccgcgctccaaaaaatcagtcga

SEQ ID NO: 24544 - DNA, 279 bp, Glycine max
  Clone ID: 701100674H1
ggctttgcagttgggccaggacgcatatagtccctatgagcttagaagtcaaagatgtcagatgtgtttgcgttctgatcctctgcataaagtgatggaacgcttggcaaatccaggtgtcaggcggcttgtcatcgtggaagctggcagcaagcgtgtagaaggcattgtttcattgagggacatattcaagttcttcattggtgattagttttggattggtgaatggaaaagtacaatggtatgtgctgtggttatgatactagagcatccatacaa

SEQ ID NO: 24545 - DNA, 170 bp, Glycine max
  Clone ID: 701100675H1
tgatgatcagggaaatcctttctggatgctggtccgtaacttgcttaaaacgccaggcaaggaacaagtagactgtcaccacccaaagcccattttgcttgatactggcgaaatgaagctaccatatgattgggcgccttcaatacttccatccagatcctccgagttgg

SEQ ID NO: 24546 - DNA, 204 bp, Glycine max
  Clone ID: 701100676H1
caaccttattgatcattctcttcatcctcctcttcttcttcaaaaaccaatttctttgatctcttccttatttgtatatatataaaaataaggaagacatcaaagaaaaaaatagcaaaatatttttttaaaaatatggaaggaacaagtgaaaaggggttgtgggaatgtggaaggaagtgcactccaccaccgtttttgttg

SEQ ID NO: 24547 - DNA, 278 bp, Glycine max
  Clone ID: 701100677H1
tggattcaaatgcttgtctaccacacttgctagtgttagcagtaacattggtattggttagttatgcaatgggagattcagctcaagacaaacagagatgtgcagaatccctggcaggtgcagcaacgtgtctgccatatttgggtgggacacgaaagcacccacagcagattgttgcagtcgtctcacacaagctatgaagaccaacaagaagtgtgtctgccttattctcaaagacagggatgatcctgatcttggcttaaagattaacatgacaa

SEQ ID NO: 24548 - DNA, 222 bp, Glycine max
  Clone ID: 701100679H1
gacaatagtttggttttgtagtaagtgaggtgaggtgccaaaatggtgaagataactcttggtactttcgatgactcttttggtgttgcctctcttaaggctaatttggcagagttccatgcaactctgattttcgtgttcgcgggtgtggttcagcctcgcttacaacgagtttacaaaagatgcagccttggatccaagggggctgtggaatattgtggc

SEQ ID NO: 24549 - DNA, 271 bp, Glycine max
  Clone ID: 701100681H1
caagaagagcttgatattgatgttcttgttcatggagaaccagagagaaatgatatggttgagtacttcggtgaacaattgtcaggctttgccttcaccgttaatgggtgggtgcaatcctatggttcccgttgcgtgaagccacgatcatctatggtgatgtgagccgcccaaagccaatgaccgtcttctggtcatctctggctcagagctttaccaagcgcccaatgaagggaatgcttaccggtcctgttaccattctcaactggtc

SEQ ID NO: 24550 - DNA, 271 bp, Glycine max
  Clone ID: 701100682H1
ctacgattcatcgcaattcacaaaatgggcaattgcttgaggcgccaatcgcggatcggatactccaccgacgacgatgaggactgggaggattttcgggcggcggcggcggcaagcggtggtgttaagaaatcgacgagagaggtgaaaattaagataacgaagaagcagttggtggagttggttggtaaagttgaggtaaaggagttgagaatggaacaggttttggcacacttgatgaatcactctcttcaacgtccatggaggcctg

SEQ ID NO: 24551 - DNA, 272 bp, Glycine max
  Clone ID: 701100684H1
acacggtgagggggtcgcaccggttcaagatcacggggtattcgctgtcgaaggggattgggattgggaagtacatagcgtcggatatattctcggtgggagggtacgattgggcgatctatttttaccccgatgggaagagcgtgaggacaatgcaacgtacgtttcgctcttcatcgcgctcgctagcgaagggaccgatgttagggcgctttttgagttgacgcttttggatcagagtgggaaggagaggcacaaggtgcatagccatt

SEQ ID NO: 24552 - DNA, 275 bp, Glycine max
  Clone ID: 701100653H1
ctaacaccttcgtttgatagatctgtcataagagaccctttggggatcggtgagatttacgcgaagtcgtggacgagcttcggtggagccaccaatgaccgaagcttgaacgtgtgggataccctcggtggaaatcaaacagatttggttaaaggattgtttgagttgacaccgttggatatcaagaagctgaagaagttagcggagtccaagtttgttgtcggagacaacaagaagaaagttagggtgacatcatttacggtcacgtgcgctta

SEQ ID NO: 24553 - DNA, 275 bp, Glycine max
  unsure at all n locations
  Clone ID: 701100619H1
ctcgagccgatttcattttctctttggaataacctgcagggttgcttccatttcacattgtatacagngntctttgttgtnttcatttctgacaagttctttttttttgacgcgttgcaaaatccttctcctcgaggcggcggcatggaaagcttgtcgcgcactgaagcgcggcatctcgcggcagttctcgtcggggtcgctgcggaggaacctctcgtggcagttcacgcgccaggcctcgctggatcctcgccggaacaaccagcgcttca

SEQ ID NO: 24554 - DNA, 282 bp, Glycine max
  Clone ID: 701100621H1
ccctcgagccgaatcggctcgacggctcgagcttggggtggttgacagttttaaacttttcttgattcgattgcaagtctcgtcttgaatgaatacttctaagaaaagggtgcctttaaactttttgaacgcttcttcttcttctttgtcatgtatgtatctctgcacttgatcaacaggtactgcctcgtgtcattggatgtgtgaatttctgaactcatttcacagaggtcatgcattattctgctgcttctctttgcatccaagacctggtgtcgattt

SEQ ID NO: 24555 - DNA, 288 bp, Glycine max
  Clone ID: 701100624H1
ggtgaagtaagagtgtggaattggatagcggaggcaactactaccacccaataaagtggcacttacaatgtgttccatttaattgttttactagtttttttttctggtcttcctttttgtaattttttagctgcaagaagggaattcgggctgaggttgggattgggaaaagcagataaagacaggtaacgggagtgtgtaatttaagtttgcagaaaaagagaggggaatctgagctgtggaagtatccttggcacaaagctgtgctcaagtaggcgtgcctattaa

SEQ ID NO: 24556 - DNA, 258 bp, Glycine max
  Clone ID: 701100625H1
tagctgtagctccgcgctcgagaagaaagcggtggcggtgccacacctgttccggctgcggcagaggaaaccaaagctcttgttattgtggagaaggagaaggagaatgagaagataccagaacctgtaaaaaagaaaggcttaaggtgaatccctgataggaaaattgtcttggaggaattagagaaagagaaacgattgtctaatgtgaaggcttgggaagaaagtgaaaaatccaaagcagagattaaagcccaa

SEQ ID NO: 24557 - DNA, 182 bp, Glycine max
  Clone ID: 701100626H1
cctcgagccgaatcggctcgagggcaagctacaattatgggtcctgcagacagtccctatgctggaggtgttttcctagtgactattcatttccctccagattatccctttaagccacccaaggttgcattcaagacaaagtgttccaccaaatataatagcatggaagcatttgcttgata

SEQ ID NO: 24558 - DNA, 159 bp, Glycine max
  Clone ID: 701100627H1
ctttgtttgttgatccatctcttgtttcttgctttctttcttcaccatgtcacttgctgggaaaatcaccactgaaatcggggttcatgcaaccgctacaaagtggttcaacctcttcgcaacacaactccatcatgttcaaaacctaactgatagagt

SEQ ID NO: 24559 - DNA, 281 bp, Glycine max
  Clone ID: 701100628H1
gttgtgcgcgacaaattaagtgagttacaacaactgggggccacagaaaaggaaattaaagaggttatgaaggacttgggcattagcagggcaaagttatatggatggccaaatacatatgtattcaccaaggcaatgggagagatgcttgtggacaactaaaaggaaacttatccgttgtgatcattcgtcccagcattgttaccagcacattaaaagaacctttccctggttgggctgaaggtgtaagaaccattgacagtttagctgtagcttatggg

SEQ ID NO: 24560 - DNA, 284 bp, Glycine max
  Clone ID: 701100629H1
caatctctcttcttacccatttcctccccccctctttctcttttcttgttctgtttttattttcactgttctctgataacaacgttgttagttgtcaccatggttgttctgtctcagccagcattaaaccagtttttccttctgaaaacatgcaagcccacgcccttgttcgcggggattcctgtggtcgacctcacggaccccgatgccaagacccacatagtcaatgcctgcagggacttcggcttcttcaagctcgtgaaccacggtgttccgttacagtt

SEQ ID NO: 24561 - DNA, 288 bp, Glycine max
  Clone ID: 701100630H1
tttctccatttccattttctctctcacttttcaagaatcgtaagctatgggaaagtcttacccaactgtgagtgctgattaccagaaggccgttgagaaggcgaagaagaagctcagaggcttcatcgctgagaagagatgcgctcctctaatgctcgtttggcatggcactctgctggaacctttgacaagggcacgaagaccggtggacccttcggaaccatcaagcaccctgccgaactggctcacagcgctaacaacggtcttgacatcgctgttaggcttttg

SEQ ID NO: 24562 - DNA, 287 bp, Glycine max
  Clone ID: 701100632H1
caaaatttggcatacgttcttttgcaacacgtttaggtaaaaaaaaggtattttggatttgtgtttccctattcgaagtggcttttggagttgtcctcctcgcaggagcatcatcttcttctcccctctggattaaaattattacgggtctaggaagtttattcctgctacaattctctggtaccagaccaaatatgtagatttgtcaagtccagattcgaccagatccttctatatgctgaactggaagttgttgaacgtagcattcttgttcctgcctttaatta

SEQ ID NO: 24563 - DNA, 285 bp, Glycine max
  Clone ID: 701100633H1
gccaaattcgatttcagagttcggccatggcgctccgacacgactgcagaaaaatttccttcgcagctctcagcgtcgagggccaatcggatccaacggaacgcaatcacaagaagcgcaggcaccgcgcttcgaagaagaagaagaaacttctcgatcgcgccggcgattcctttgatccgcattcggtgccgttggagaacggaggatcatgtaacggattcgagctcgacgctagcatgtatcctgcggcggcggcggatgaagcttcgtcgtgtgcgagga

SEQ ID NO: 24564 - DNA, 284 bp, Glycine max
  Clone ID: 701100634H1
cctcgagccgcggctcgaggtattttgaacgtctctgccgaagataagaccactggccagacaaataagatcactatcaccaatgacaagggtagactgtcaaaggaagatatcgagaagatggttcaagaggctgagaagtacaaatctgaggatgaagagcacaaaaagaaggttgaggccaagaatgctttggaaaactatgcatacaacatgaggaacactgtgaaggatgacaaaattggtgagaaacttgatcctactgacaagaagaagattgagga

SEQ ID NO: 24565 - DNA, 280 bp, Glycine max
  Clone ID: 701100635H1
cctcgagccgctcgagcggctcaagcgctcgaggactgatattcagcggaacagcatccgtagttcttgcacgactagttgcatctctgaagctggttgggggtaacttagctgatcacagattcttattccttggtgctggagaggctggcatggcatagcagaactcatagcacttgaaacatcaaaacagacaaatgctccactggaggaagtgcgcaagaatatttggctggtggactcaaagggattgattgtcagttctcgcaaagattcgctc

SEQ ID NO: 24566 - DNA, 251 bp, Glycine max
  Clone ID: 701100637H1
cgctcacactcactcatttgcaaagaaagagagagaaatggcactgagggcagccgtgctccgccacgttcgtgtgccactccaagccgctccaaaactgcagccatggcgtgccatgtcatcacacggcgacgatcatctctccaaagaggaggtcgtcgaaagagtcctcgccgtcgtcaaagatttccccaaagtcgatccttccagggtgagtccagatgtacatttccagaaggatttgggtttgg

SEQ ID NO: 24567 - DNA, 246 bp, Glycine max
  Clone ID: 701100638H1
cgagatagagaacagatagagataacactaggcagcacaagagaatggcgctgctgtgtggttcaacttccgtgactccattcctttctcacaagaacgttggtttcacaacctcagcaaaatcttcctttgttggctttcaattgccgcttcaaagctcacattatcttcttccgttcgaacccttctgccggcaacatcccgtgtccgttgccagcaagagtctactactgttacccctgtcgc

SEQ ID NO: 24568 - DNA, 285 bp, Glycine max
  Clone ID: 701100641H1
gctgcacgcgcttcgttcacatacaagaacagaacgacgtcgtttgcccgcgctgccacggcggcttcgtcgaaaaggtcaccgccccccaatcgtcaaggcaaggcttccgccgccgacgccgcaacgccgggaaccactcggcgttcaacccggtgatcgtgctccgcggaccgggagaggacgaggagagcagctttgagttatactacgacggcttcgacggcgaggggctccgccgctgccatccaccatgtcggagttcttgcttggatcgggattcga

SEQ ID NO: 24569 - DNA, 275 bp, Glycine max
  Clone ID: 701100642H1
cagacatgaaacctctcagccaactgctggtattatttcaaatgtcaccggccctggatcttcaagaacactgattccttctcagaaacctggtttgcttggacctcctgtcaagcatgatggcaactctgttgatcgtgattatgacatgagaaaggacttttaggcatgaggcatggtccagtcataagaggtcaaatttcagctgaacctcctctgatattgaggccacctaatcaagcatcaccatctttgatgcagccatttggaggtgg

SEQ ID NO: 24570 - DNA, 283 bp, Glycine max
  Clone ID: 701100645H1
ctcaaatattcattttgtcaccaatcacatctcatttttctaaattcttgtttacacactctcattaatttattacattccatattgtaattaattcttcgtacgtatccatgaagagacagagagatttcaaggggtttgagagcatagatttggcaaattgtctaatgatgctctctcatccccaacaaaatgagaaactacttcaaaaaaaaattgaggctgtggaatttgagtgcaagacatgcaaccgcaaattctcttcctttcaagcattgggtgg

SEQ ID NO: 24571 - DNA, 284 bp, Glycine max
  Clone ID: 701100648H1
cagacatgaaacctctcagccaactgctggtattatttcaaatgtcaccggccctggatcttcaagaacactgattccttctcagaaacctggtttgcttggacctcctgtcaagcatgatggcaactctgttgatcgtgattatgacatgagaaaggacttttaggcatgaggcatggtccagatataagaggtcaaatttcagctgaacctcctctgatattgaggccacctaatcaagcatcaccatctttgatgcagccatttggaggtgggttggtaga

SEQ ID NO: 24572 - DNA, 281 bp, Glycine max
  Clone ID: 701100649H1
ctcaaatccaagctcgggaacagagaaggagaaagagaatggacgccattgattctgtgttcgatccgttgagagaattcgcaaaggacagcgtgaggctcgtgaagcgctgccacaaacccgatcgcaaagaattctccaaggttgccgtgcgtaccgcaattggtttcgttgtgatgggattcgtgggtttcttcgtgaagcttattttcattccaattaacaacatcatcgtcggatctggttaggatgaagggtactacaatcgcctcaggaattca

SEQ ID NO: 24573 - DNA, 276 bp, Glycine max
  Clone ID: 701100650H1
ctcgagccgctcgagccgctcgagccgattcggctcgagtcgagccgattcggctcgagacccaaatcacgctaccttctctacctggggctcacctgctggaaaattagatacggccataaatggagaagagctgaataagctgaggaatctgcttcctttggatttcgaagcagcagtagtcctctaacaaaggcttcaaacaaaatttcagcaaatgttgatgatgagccagatgtgtcttgggttaactcacttgtgaaggatgctccacca

SEQ ID NO: 24574 - DNA, 276 bp, Glycine max
  Clone ID: 701100651H1
aacggatccaaactcccttggatgttactcgtatgatttagttggaaaaccactcgatgtgtatgacaagcttcgtgcacctttgggcaatctattctttgggggagaagctgtaagcttggacaatcagggatctgtgcatggagcttactcagctggggtcatggctgcagaaaattgtgagagctatcttttagaaaaactaggccacgtggaaaagctatctctagcttctgttaggcatgaaatgcttgacactcttatacctcttcagat

SEQ ID NO: 24575 - DNA, 276 bp, Glycine max
  Clone ID: 701100652H1
acctttttcaccttccccctttgtttctcaacatcattctcctcattcccctacctacccccaattttcccttctgtatttctctttttcaattctcgatttcccttctcccttttgtgtcttcataatccagatcctctcttcgatctagggtttctggcttaattaacaatcaaatgtttaaggaagaatttctatgacgattcgcaaccccatgcgacgaattcgtctcctccactccttctccgtcgtcttcctctactggttctacgtttt

SEQ ID NO: 24576 - DNA, 287 bp, Glycine max
  Clone ID: 701100618H1
tgccatttcaatccccagtttcttcttcaacgtcctcttacgagcagatcccaattctccttcccagtttcaaaccctaattccctcattcccatggcctcagaagagcccactgtcgcggtggaacccgctcccgaacctgccaccgccgagcctcccccggaggagaaggaggagcccaaacctgaagccaaggctaagaaaaccaaggaacccaaacctaaaaaggtttcccagacacgcaaccctcccactcatccttcctacgaggagatgattaaagacgc

SEQ ID NO: 24577 - DNA, 261 bp, Glycine max
  Clone ID: 701100580H1
cttcaacgagctcaaagaaaccaataagctcgttgtgatagatttctcggcgtcgtggtgcggccttgcaaattcatagagccagcgattcacgccatgtccgaaaagttcaccgacgttgacttcgtcaagatcgacgtcgacgaattgccggatgtggcgaaggagtttaatgtggaggcgatgccgacgttcgtgttgtgtaagaaagggaaggaagtcgacaaggttgtacgggcaaagaaggacgagctcgaaaag

SEQ ID NO: 24578 - DNA, 252 bp, Glycine max
  Clone ID: 701100583H1
cctttctttattctctccttcctcttccttcttcttgcctcatctgccactgcttgtgatcgctgcttgtatcaatccaaggcttcctatttctccaaagcttctgctctttcatctggggcatgtgggtatggctctttgacactagacataagtagtggacaccttgcagctggtgtggattctctcttcaaaaatggagcaggttgtggtgcctgctttcagataagatgcaagaacccaactctatgt

SEQ ID NO: 24579 - DNA, 256 bp, Glycine max
  Clone ID: 701100585H1
atccaacacactcttgtcttgtgattcttcttcttcattctccctttttttgccctagattagatcctttctcttccaatcattaattaattagattagatttgatttgatttgatttaccttaatccttcgtcttgtttttccttccctcaactccaccattcctgatttttctgcatcagtctattcaagttcattgtagggtgtatatccttgattttgtgtgggtttgagttagggtgcatgtgaatgaaaa

SEQ ID NO: 24580 - DNA, 257 bp, Glycine max
  Clone ID: 701100586H1
caattttaatggcttgttcatcatccgattcataaaaaccagtgacgtcgctgttgttcttttccttcctaattccgataccttccgattctctttccgccctacgcatactatatacttgttcatctctctctttctcaaattccgattcctttttgtagcatacacaccgtactagcccaactaacaaaccaaacaaaaccgttaccatgggaaaacgtaattctcaacgtaaaagtgctgcgatgttcgatagt

SEQ ID NO: 24581 - DNA, 260 bp, Glycine max
  Clone ID: 701100587H1
ccacgcctctcgtaatcctcttcctcttcctcttcatgttctcggagctccggctccactagcggagccccggctcagttcaaacccattttccaacacaacaaaaaaatgataactccattttctctcttccctttcgagatctcgaaaatgtccaaaccctgggccaaggctggcgttggatccgcctcgaggcgatggtttgggtgaatgagtctccggtgaaggcgatggataaggcgaatccgtttggcgcggcg

SEQ ID NO: 24582 - DNA, 261 bp, Glycine max
  unsure at all n locations
  Clone ID: 701100589H1
ctcgagccgccctatcttctctcttgtcttgattccattcaatttaaaccttcagngcgtggcgactttcaacctttttcgagcacccattaacattaacatggccattccctacccccatttcatcgccaccgagaaagccgccatggacgccggcctcctccacccctcctccccctcctccgtcatcctcacccaagacgacctcaagaaaatcgccgcctacaaggccgtcgagtacgtcgagtccggcatggtcct

SEQ ID NO: 24583 - DNA, 251 bp, Glycine max
  Clone ID: 701100590H1
cgcatttgcactgtttgtaggtgtctccgtcgcagccaagatctcgggtggccatttggacccagctgttacttcttgattggccatttgaggcaacatcaccctcatgactggtttcttatactggatcgcccagttgtcgggttccattcgggcatgcctccctctcaatttcatcagcgccgagagcattccaagccatgcaccggccactggtgtgaacgatgttcaagctgtagtgttccagattg

SEQ ID NO: 24584 - DNA, 255 bp, Glycine max
  Clone ID: 701100593H1
atcttcatccttcatcggcattgcgcttcacaaattctcagtctacgacttggtggatttcataaagttgtgataaacatgggaaaagactcaaagccaaaggagtccggaggcaagggaaaggggaaacaggctgcaagtggaagtgatgagaatgcttctaagggaaaaggaaaaggtgggaaaggtggagatgggcttggtacttgcacctatgtcaaagctaggcatatcctatgtgagaaacaaggtaag

SEQ ID NO: 24585 - DNA, 177 bp, Glycine max
  Clone ID: 701100594H1
acgcaggcggattctactgggatgtttatttgcccccacaccggggttgctttaactgcattggttaaaggccaggaccagcggggttattaaggccactgataggactgtggtggttagcactgctcatggcttgaagttcactcagtccaagattgattaccattctaaggacat

SEQ ID NO: 24586 - DNA, 291 bp, Glycine max
  Clone ID: 701100601H1
ggaaagttctgggaaaacatgccaagaacattatgctcatgtctaaggttgaaaaccaagaaggggttgcaaattttgatgaaatccttgcaaattcagatgcatttatggtggcacgtggtgaccttggaatggaaattccaatagagaagatatttcttgcacagaaagtgatgatttacaagtgcaacatccaaggaaaaccagttgtcactgcaacccagatgttggagtcaatgatcaaatctcccaggccaaccagggctgaagctactgatgttgccaatgcag

SEQ ID NO: 24587 - DNA, 299 bp, Glycine max
  Clone ID: 701100602H1
tacggctcgagatcatcctgcttctagtgctcttccttgtcacccaacttggtgtggtgtatgctattcatcatcatcatctaagatgctgagaaaactcatgaggctgctactgctgctgatgttctttctgtgtttctcatatgttctctctgtctctgctattcctgcaacaagaacccaaaatttgaaaggcgaagaagaagaattttcagccctgccttctttaactaggttggatcatgtggttggaaatggtgaggtggtgctcgttgacatgaatgaaggattcatggaga

SEQ ID NO: 24588 - DNA, 283 bp, Glycine max
  Clone ID: 701100603H1
ctcgagccgaacaaccttctttctttttctgtgagcctttctttcaggttcttaacttgatcagtgtgcagtgtccaaatcataagggtagttgcaaattgcaatggctaagcatgatgttgagggtggttccttctctgcaaaggactaccatgatcctcctccagcaccgttgattgatgctgaggaactcacacagtggtccttctacagggctttgattgctgagttcattgccacaatgctcttcctttacatcacagtgctcactgtgattggttac

SEQ ID NO: 24589 - DNA, 271 bp, Glycine max
  Clone ID: 701100604H1
gagcgattcggctcagtcacgcgcgtcgccgtttaactggaaactaaaacgcctcctcaacataggatcacgcgaagaaactgagagaaacaattaacgtcgtaaacgacgtcgcaaaagagatgataaagcagagaagagaaatggggttcaagacgcggaacgaccttctctcgcggttcatgggatcaatagacgacgacgtttatttaagagacattgtggtgagttttctattagcgggtcgtgacaccatcgctgccgggttaac

SEQ ID NO: 24590 - DNA, 291 bp, Glycine max
  Clone ID: 701100606H1
tcaaaactgaccctgattgcgttggttgttgcggccctgtgcgccgttgatctaacccagagagcatcatcatcatcatcatcccctcacgcgccagcgccctccgtggactgctccaacctggttctcaccatggccgattgcttgtccttcgtcacaacggcagcaccatcacaaagccagagggcacatgctgctctggtttgaaagtctgttcgtcaaaaccgctccggcggtgtctctgcgcagctttcaagagcatagcgctcaattcggcgtcgttttgaatgt

SEQ ID NO: 24591 - DNA, 232 bp, Glycine max
  Clone ID: 701100607H1
gttttgttctcattctgtgactctgtgcttagttaacgttaacagtgacttaagatggcggattctgcagatgtcacccacgatgttgtgtccctcttctcttctcctcaaagggactttcttcttcgaaacaacggcgatctcgttaaatttgccattttaaaggtcacaaactgggttggaattttccggcatcctggcgtggtctatgtcaaacatttacgccaacttt

SEQ ID NO: 24592 - DNA, 290 bp, Glycine max
  Clone ID: 701100609H1
ccaaggccgagcccgagaaaaagaaggacggtggcggcgagaagcccaaggccgagcccgagaaaaagaaggacggtggcggcgagaaacccaaggccgagcccgagaaaaagaaggatggtggggagaagcccaaaggggatgctccgaaaaaggaagcgagaagcccaagcccgggcccgagaagcccaaggacaagcccgcgccagctcccttacccgtgcagccacatatggctgcacctatggcggttccagttgggatgctctatgctcctcctccgtgctacg

SEQ ID NO: 24593 - DNA, 284 bp, Glycine max
  Clone ID: 701100610H1
tgtggaatcgatgacttccggaaaatgcctaatggtgtcaatggtattgaagacagaatgcatttggtatgggatatcatggtggaatctggccaaatatctgtcactgactatgtcaggataacaagcactgaatgtgctaaaatcttcaatatatatccaaggaaaggagctgttctcccaggatctgatgcagatattatcatcctgaatccaaattcgagctttgagatgagtgcaaagtcctcacactccagactggacacaaatgtctacgagggaag

SEQ ID NO: 24594 - DNA, 276 bp, Glycine max
  Clone ID: 701100612H1
cggctcgagcagccttgaacttgaactatcgtgtcttcttggctttctctgttcaggatcaacatggatattgtatcacgagctttgctatttccgttggctatacttgtgctcatattaagcacaccttgctcaggtgcttttgggaagagtggaataatgtgaatcacacctatttttctgtcccccaagtttgaacttggaccaggatcggtagccaataaatatgattatgacgctgatttccaagaggtcatatagcattaagagtttcaa

SEQ ID NO: 24595 - DNA, 262 bp, Glycine max
  Clone ID: 701100613H1
ctcaaaccaaggacaaatcctagagtttctcctttggttgaaagagtaggacctgtgagtgtcacaaacatgggagaggagaatgttaaacaaccgttgttggcgaggaagtacttcaaggactgcccaggttgtaaagtggatcaagccagagagttgagtgagggaaagggtgtacctgttaaaaatctttttatcatgtggtaggtggtgctgtgtgctgcactgcctataccatctctgtttccattcctctatttca

SEQ ID NO: 24596 - DNA, 286 bp, Glycine max
  Clone ID: 701100614H1
taacaagctagctattagttcgattttgtagtaagtgaggtgccaatatggtgaagatagctcttggtactttggatgactcttttagcgctgcctctcttaaggcttatttcgcagagttccacgcaactctgattttcgtgttcgctggtgttggacagccatcgcttacaacgagcttacaaaagatgcagccttggatccaacggggctggtggcagtagctgtggcacatgcatttgcactgtttgtaggtgtctccgtcgccgccaacatctcaggtggc

SEQ ID NO: 24597 - DNA, 291 bp, Glycine max
  Clone ID: 701100615H1
atcgggaagcaaaaaaaatgagaatccatcacatagcatgcctccaagacaattattcctatctgatcgtagacgagagcacgaaggaagccgcggcggtggacccggtcgaaccggagaaggttcttgaagttgccagctcgcacggcctcactctcaattcgtcctcaccacccaccatcactgggatcatgctggtggaaacgacaagataaagcagctggtgccaggaatcaaagtctatggtggttccattgaaaacgtcaagggttgcactgacaaagttgaaaa

SEQ ID NO: 24598 - DNA, 289 bp, Glycine max
  Clone ID: 701100616H1
gaagaacccaacccccaatccaacccatttatgtcttgaatgtagaaacttgatttaggacaagctcaagagcattccatcagtatcttgagccccaaatggagaacacctggatcctgagttttcaccttctcctcctcctgctccatccatatgcagcacaggggccatcagtgttggtgttggtgttggtgtgggtgttggtgttggtgttggcattggcattggcaacagcccaggcccctctggctccactggatccaacctgaagaatgccttcacagcactc

SEQ ID NO: 24599 - DNA, 287 bp, Glycine max
  Clone ID: 701100617H1
cagagcaccatttcgagtccaaggcagacgccggtgcctccaaaacctaccctcagcaagccggtacccttcgcaagaacggctacatcgtcatcaaaggacgcccctgcaaggttgtggaagtctcgacttccaaaactggaaagcacggtcacgcaagtgccactttgttggaattgatattttcactgccaagaaacttgaggatattgtgccctcttctcacaactgtgatgttcctcatgtgaatcgtactgattaccagctcattgatattgctgaggatg

SEQ ID NO: 24600 - DNA, 204 bp, Glycine max
  Clone ID: 701100579H1
cggctcgaggaaaatgtgtggaatatttgcgtatctgcattacgacgtgaacagagacagacgatacatcttgcaggtcctcttcaatggcctcagcagattggagtaccgtggatacgattccgcaggcatcgcgatccacgattccaatttctctccccttgttttccgtcaagaaggaaacattgaatcgctcgtcaaatc

SEQ ID NO: 24601 - DNA, 267 bp, Glycine max
  Clone ID: 701100543H1
atttctccctcaccttctcgctccccacacgcccctctctctcctcccatggccgaccagctcaccgacgaccagatcgccgagttcaaggaggccttcagcctcttcgacaaggacggcgatcgttgcattactaccaaggaacttgggactgttatgaggtcacttggtcaaaacccaactgaggcagaactgcaggatatgataaacgaggttgatgctgatggcaacggaaccatcgatttcccagagttcctcaacctgatg

SEQ ID NO: 24602 - DNA, 271 bp, Glycine max
  Clone ID: 701100545H1
cggtaaggtcgcgttgtgttgcgtcgtgtcgtgcgctgttcctctgtctgtcgtttttgttttgcagcccaaaccctaagctccgcatcgcaaccatgtcgaccaagcaaggtggaaaagctaagcctttgaagaaacccaagtctgataagaaggattacgacgaggttgacatggctaacattcagaagaaaaaggaagaggagaaggcgctaaaggagttgaaagccaaggcgcaacagaagggaagctttggaggttctgggctcaa

SEQ ID NO: 24603 - DNA, 256 bp, Glycine max
  Clone ID: 701100546H1
cttactctctttctctctctaaagggtttcctttgttctcttccaacttccaaggtaaccattttaatttttgagcctcattttgttgatgagaaaattaaaaatgaatatcatctggggtacttaaagtttgagactttgaacaatcttctattctgggtgttccacaatttgctgattttttttttggggtccgaaaatgaaaagaaataattgaaagatttttagccttttcgacgttatccatttgtgctaa

SEQ ID NO: 24604 - DNA, 209 bp, Glycine max
  Clone ID: 701100547H1
ccgctcgagaatcttcagtctcatcgagcgagcacaatactgttacaatgaagacacctgaaacacagggctgctgttgacttggacacccattactctcaagaatatcttgaagaatatgttggaacagataagaggagagccatcttatatcagcaatatgttaaaggtatatcaacaactgggatgcaatctaactagggttccga

SEQ ID NO: 24605 - DNA, 271 bp, Glycine max
  Clone ID: 701100548H1
ttccagttcctttcgatgatcctgccggtgattacactgtcctcattggagactggtactagctcgaccacacggatttgaagtctcagcttgatagcggtaggaagctgcctttacctgatggaatcctaatcaatggtcgtggctctaatggagcatatttaaatgtggaacaaggaaagacttacaggcttagaatatcaaatgtggggttggcaaattcgctgaacttgcgcatacaaaaccacaaattaaagctggtggaagtgga

SEQ ID NO: 24606 - DNA, 262 bp, Glycine max
  Clone ID: 701100549H1
cgcaaatgcaggcacagaagacacgtgatttttccggtggctggaagttgaggattgcattagcgcgagtcctatttatgaagccaaccattcttctacttgatgaaccaaccaatcaccttgatttggaagcttgtgtgtggctggaggagagtttgaagaagtttgaacgtattctggttgtgatttcacactctcaggactttcttaatggtgtctgcacaaatattatccacatgcaaagcaaaacactgaagctcta

SEQ ID NO: 24607 - DNA, 261 bp, Glycine max
  Clone ID: 701100551H1
cagacatattggcattcgcagcacgagacagtgtttccaaagtgggtggcataagctacgacgttccatcgggacgaagagatgggcgtgtctcgatcggcgatgaagtgctagacaatcttcctagaccatccttgagcgctgatgatcttattagtaactttgagcgaaagggtttgtcagcagatgaaatggtgacactctcaggagcgcattcaatcggtgtgtcccattgtggtgccttctcgaatcgcttatact

SEQ ID NO: 24608 - DNA, 262 bp, Glycine max
  Clone ID: 701100555H1
ctttctctctctccaaatcaaaacccatcacaattcacaacaacatacaaattgcaaatcctatcttttctcttctcatataaaagaacccttctttcgaatccttcccgctcttttccctctgatttaattcatgcgcagatccaaaccctaatccatctctccgagaaatattgtgtccacagtcaatttggactgtaagttggacctcaaaacaattgcacttcaagctcgtaatgcagagtacaatcccaagcgtttt

SEQ ID NO: 24609 - DNA, 266 bp, Glycine max
  Clone ID: 701100556H1
ctaaacctaaacctaaacataaactgaatttcccaaatccccttcacaattttcaccgaacctaatactcccaaaccaatcttcgatcatggccgccgaatcacaacctcaactaatcgaagagagaagagaggagcaagaacttaagtacctggaatttgtgcaattcgcgaccatccaggccctgatgcgctgcgccatcctctactcctacgccaaggagcgcgcgggtcctctgaagcccggcgtcaacaccgtcgaggagg

SEQ ID NO: 24610 - DNA, 244 bp, Glycine max
  Clone ID: 701100557H1
accacacagcactttccccaaatcagatcatcggaaccctaagtcgcgtattccgatcttgacccaagttcggtatggcgatcttgctgggcgaaattcttcaatcgctgtatgtgtggctgaagctgatcaagaacccgcagcctcatccctacgtgaaccctaatctggaccccgtgttgcgggtggccggtgtcggatgctccatgctgtacgccgttgacgaatccgaaggaagccgaga

SEQ ID NO: 24611 - DNA, 263 bp, Glycine max
  Clone ID: 701100558H1
ccgcaatccaaaccctccaaggtttctttcctgtgctcctcctcgcgtggtgcactacgcaccaggtttttgtagctaccaccgtgcccaattcacatcgcatgtctcgaacgctttgtgctgcaactgaaatcgaaaatcagagaaagcggagaagagagagagacgatggctgatctctttgcgtggctcatctccttcttcattcttattgccttaattgtactcgtcatttaccagttaatgtgcctggcagacctaga

SEQ ID NO: 24612 - DNA, 263 bp, Glycine max
  Clone ID: 701100559H1
agacaggacggccaaatggagttgttcttctacgcggtgttcggccgtttgggagcggttgtttgagtcacggagctgagcaagagcaacaaggaccgaatcaacacctcttccgcattcaattccttcgagaacaactacctcatcgtctattccctcatgatggctggagattggctacaaggtccatatgtctactacctttacagtacatatggatatcggaagggagacataggacaactcttcattgctggttttgg

SEQ ID NO: 24613 - DNA, 267 bp, Glycine max
  Clone ID: 701100560H1
cttttgtaagacagccaatgttaaaagctagcctatgtataatttctgatgagggtaagcactttgaattaaaatgtttcagccacacttaaaaggaaccgctcactcaccaaggatgaaattgatgcttactggaaatcaaagaagaagatagaggaagaacaccttagagctatttccaacttgtcagagactattcaggctagcaaaagcacagaacctgagaagaagttgcagaagtcaatgaccatgcctgtgacccgtgca

SEQ ID NO: 24614 - DNA, 269 bp, Glycine max
  Clone ID: 701100563H1
gcttcccgcactcctccccgcctctttcttccgccagccttatgccgccacccccgcctagcatccacacgtgtcgcgagtgcaacatcgcaggatgcctgggatgcaactttttccccgaggaacaaaggaagaaatacagaggagttaggcagaggccttcgggaaagtgggccgccgagattcgcgatcgtcatcgttcggcccgggtctggctcggtacattcgaaaccgccgaggacgccgcccgggcctatgacaaagcctcg

SEQ ID NO: 24615 - DNA, 284 bp, Glycine max
  Clone ID: 701100564H1
gctcgcaccggtcgaaccaaccaggtatgggaacggaaacctgctgatgagaagattgagataaatggggaaaacaatactcaaaaatctgaagttagctcggaagtgctcaaggagtcccttgctgagaaggatagtgatgaccacaaagttcccgagaatggatgtgctacaaaaactggagatgccccaaagggtgctaaaccagttgttcctgagagcaagattgtagccaatggggttgtttctaatggttgctaagctctactgtgtttgaaggaggc

SEQ ID NO: 24616 - DNA, 262 bp, Glycine max
  Clone ID: 701100567H1
cctctctctatgcctcaccacaacaacaacaacactcctgcaacgttaccggcttcaacaagggacgaggcatctattccaccaccaacaccagcctttcctcctaccatcctactaaccttaacaacaccgcttttcgaggcctcaacaacggaatccattccaacaccacatcctcaccctatcttaacaacaaccaccaccacctcgacgacaacaacaacctcaacagacctaatctcaagggctacaagacatattt

SEQ ID NO: 24617 - DNA, 257 bp, Glycine max
  Clone ID: 701100568H1
ccgcgagtgaactccgttgtcacccccaccgacatggcggtactctttttgagccgccaactccgccaccaagagattgcctggtcgcaaggcacgtgttctcccggacaactgcgacggcggagatggcaacatacagaagagagttcaaaacctggaagtttaagtgagattccaaggttgagtctggaaggagtcgagtcagggtttcagtgtaggttaaattattgtaggtcaaggaagcctgtcttggagac

SEQ ID NO: 24618 - DNA, 253 bp, Glycine max
  Clone ID: 701100570H1
gtcaggatgtccaaaaaagctggatggggtgtcatggcgagtcacagaagtggagagactgaggataccttcattgctgacctttctgttggtttggcaacgggtcaaattaagactggagctccatgcaggtcagagcgtcttgctaaatataaccagctcttgagaattgaggaggagcttggtgcggaagcagtgtatgctggagctaacttccgtacccctgttgagccctactaaagttttcaagtgg

SEQ ID NO: 24619 - DNA, 259 bp, Glycine max
  Clone ID: 701100571H1
cccttatctctctctctctctatctctcccgaattcttgtccgttcgacccttttacttagtattcctcgtttccggtattcgctcccttttttctgcattctggttttacttagatctctgtcccgcaccagatctggtgcagggtgagagtgttgggttcattaattttgtatcaatcttccttctgagcggtaggcgtggggataccagagtcttttcgggaagcaagagagggttctctccgttttcaatagatc

SEQ ID NO: 24620 - DNA, 261 bp, Glycine max
  Clone ID: 701100573H1
ccttcttacaatttattatctttctctaagaactcttccaattttttctctctcttcctctttagcttcatcgccatggcatcaccagcaagaaccttctttgccttcattctcgccgtcgtcgctctcttcttcgccgccgccaatgctcaagacctctccccggctccgagtcccgatgccggagcggcgggatccgtttcgagctccgtcgccatgatcggagcttcggttgtgctgtcattgatggctatcttgaag

SEQ ID NO: 24621 - DNA, 262 bp, Glycine max
  Clone ID: 701100576H1
acggaggagaacaagattgttgatttcatcaaatttgatgttgggaatgtagtcatggtgacgggtggaacgaataggggtcgtgttggagtgatcaagaacagagagaagcataagggaagctttgacactatccatgttcaggatgctactgggcatgaatttgcaactcgaatgggcaatgtgttcaccattggcaagggaacaaaaccgtggatgcctcttcccaagggtaaaggtattaagctatcaatcattgagg

SEQ ID NO: 24622 - DNA, 264 bp, Glycine max
  Clone ID: 701100577H1
ccttctgacgctcgcctcacctctctctccgaaatccccaaattgcctgtgaatgctagaaaaccctaggcacgttcgatttgatgctctcccatttgcaatcaagggcgagcgcattcggttcttgcacgcaaggctggtactaccgctgcatcggcctcgatccctgaattcatcattctttctcgcaccatctttttctattccgattcgatttgttgttgttgttgttgttgttgtgtttttgcctccttcctcgacgaa

SEQ ID NO: 24623 - DNA, 224 bp, Glycine max
  Clone ID: 701100578H1
ccttgaactcaccaacaatcttctcctactaccaataacaatgattgttctcctaatagccaaaactgttggagacagtttcaacccaagcatctatgagattatactgcacttgaaaggccttcctttcattgatgcaaatcctgagccatggatgagaaatctcactgtgggtgagcttgttgatgtatagccaccagtggtcaccctcaatggagtagaaa

SEQ ID NO: 24624 - DNA, 207 bp, Glycine max
  Clone ID: 701100542H1
tctttctctaccaaattgcctttggtcctattatcttcatcccttttcatccatgcatctttggctgagatggtgtgtgaggacctgccaaaggaagtgtgtgctcttctcactagcttcatcagggaagaggtgtttcttggagactgagaaggcagccgacggtggcgtcgagtaccaatgccggacatcggaagtggtggtgga

SEQ ID NO: 24625 - DNA, 272 bp, Glycine max
  Clone ID: 701100513H1
caatattgctctctaagctttgattcttcttaattcatacagatcccacactcattcattagcgtgcgtctggttttctgcctgaaatggagtacatgaaccagagaccaaaatatgattgccttctttttgatttagatgatactttgtatccactaagcactggtcttgcaaaagcatgtggccaaaacattaaagactatatggccgaaaagcttggcatagagaaaagcaaaattgatgacttgtccaacctcctctacaagaactat

SEQ ID NO: 24626 - DNA, 280 bp, Glycine max
  Clone ID: 701100514H1
cactcgagccgattcggctcgagcatcaaccccatcacaacttccatcaccagcacgaagcagaccaatgtctcacaccagaaacgcacactccttttctgttcccccatgttgattccactgttgtccctgaaccctccaatttcttctcctcaaaccttgtctcaaatccactccccacaaactccttcttccaaaactttgtcctcaaaaacggtgaccaacctgaatacattcacccttacctcatcaaatcctcaaactcttgtctttccctctc

SEQ ID NO: 24627 - DNA, 178 bp, Glycine max
  Clone ID: 701100515H1
cagccgggttcagattccaccccactgacgatccgcttgtgaatcactacttgtgtagaaagtgtgctgcacaaaccattgctgttcccatcatcaaagaaatcgatttgtacaagtttgatccatggcagcttccagagatggctctgtacggggagaaagactgggactttttctc

SEQ ID NO: 24628 - DNA, 276 bp, Glycine max
  Clone ID: 701100516H1
tgcgaattagggtttgtgattggatcgccatcttcaccaattaccattaccatagaacttaatcttctctctcgccatgacggacggcttctggaatcggcagcagccgcttcacccttcttccaccatgctcaaacgacctcgtactgaatatgatatgtcaccttctggtctgacttcaggggggtattgaatgccttatttatattgctcaaattgttgaccacaccggtcatcgaatgctaaaggacactaacacaattggatctgcttatg

SEQ ID NO: 24629 - DNA, 265 bp, Glycine max
  Clone ID: 701100518H1
cgtggttgagatcgctagggtgatgagcccgcgctccatggcgaaggatcttagtgggaccatcaaggagattctcgggacttgtgtttcggttgggtgcaccgtggatgggaaggaccccaaggatctgcagcaggaaatttctgatggagatgttgaggttcctcttcattgacgttagtgaaatttcagtgtttttttttatttgtttcgattatgttgtttttgttttcggcaattttggttttttttttacaaggataaa

SEQ ID NO: 24630 - DNA, 267 bp, Glycine max
  Clone ID: 701100519H1
cctcaaggtactgcacaaatccccagatctacctgaaagtttgtcttcagagggacaggatttccttcagcagtgtttcagaaggaatccagcagaacgaccatcagcagcagtgcttcttacacatgcctttgtacaaaatttgcatgatcaagatgttcaagttcattcccaagggcaaaactgtcccagaggagaccctggaccaggagatgattcacgtagacatagccccggtaacagttcaagaaatagccgtggtgtagg

SEQ ID NO: 24631 - DNA, 265 bp, Glycine max
  Clone ID: 701100520H1
aattgttccattttcatttctttcgcaaaaatagcaactacttcctcagaaaaaaagtttctaagttaaggaaatccagagagacaaaaattgtcggttacggttcagctacatgcatagacatcctccttaccatcattctccctcctcttggagtctttctcaaatatggctgccaggcggagttctggatttgtttggtgctgaccctttttggttatatacctggaattatctatgctgtctatgctatcaccaagtgatc

SEQ ID NO: 24632 - DNA, 213 bp, Glycine max
  Clone ID: 701100521H1
caattacatatagcacaattctttaagagtgtattactaaggaaaaacaatgaaagttctgtacttccttgttgccatcttggctttgacatcctctcttgtctctgcctatgatcctagtcctctgcaagatttctgtgtggcatccaaagaaaaagatggtgtgtttgtgaacgggaaattttgcaaggaccctaagcttgccaaagttga

SEQ ID NO: 24633 - DNA, 254 bp, Glycine max
  Clone ID: 701100522H1
ccagaagacgtggaggctgtgcagatcagtgggggccctgctggtctggaagcagagttgcagcaacttaaggacctaaggagggtgaatcaagagttgctggtccagactgaggaattgtggcagaacgcagcaagggaagattctgacacttagaagccaatttggcactaaatggaccaggcctcaatcaagcaccttgaccaagaacttgcaggctaggctagacaggtttgcagggaacttgaagcaag

SEQ ID NO: 24634 - DNA, 269 bp, Glycine max
  Clone ID: 701100524H1
cctgcactcaccactgccacacttcaatcgcactaatggctgtcaccttctcagatctacacaccgaatagggcagcgaatccctcgatcaattcctgtctgggaaaacctatatttctggggatcagttgacaaaggatgatattaaagtgtatgcagctgttgttgaaaagcgaggggacacttgtcctaatgctgccaagtggtacgatgctgtctcttctcaacttgctccaagctttcctggccacgctcaaggggtaagattc

SEQ ID NO: 24635 - DNA, 270 bp, Glycine max
  Clone ID: 701100526H1
actccctgctatctcaacaattgctgaaagttcaagcacggtaacaagaagaacggcgaatacagtatacgattacgaatacagaacagagaacgtgaaagtcgtggaggaacgaaccgaggagaaaatacagaggagtgagacagaggccatggggaaaatgggctgcggaaataagagaccctttcaaagctactagggtgtggttaggaacatttgaaaccgctgaggacgcagccagagcctacgatcaagcttcattgcgtttca

SEQ ID NO: 24636 - DNA, 273 bp, Glycine max
  Clone ID: 701100527H1
attcttacaagttacatccattgagaaacatgaaggtctcccccttagcattttcaatccttctttttgtccttcaccatagaactcttcattggcattgcttcagcagcacaagaaccagtgcttgacacctcaggccagacgctgagaacaggtgtcaagtactacattctaccagtcttcagaggcagaggtggaggcctaacagtttcaagcagtggcaacaacacatgccccctctttgtggtgcaagagaagcttgaagtctcaaag

SEQ ID NO: 24637 - DNA, 171 bp, Glycine max
  Clone ID: 701100528H1
cccttttttaattggattttaatcgcatgatttttgttggatgggattcaaactatttgtccttctgatatgaacgttgctttaagcattatgttatttgcgttattttcattattagatggtatactcaattgttatgcactttacctgtaggaattattctgtcttgtt

SEQ ID NO: 24638 - DNA, 274 bp, Glycine max
  Clone ID: 701100529H1
cctttattcatttcatttctcttatcctatgaacactcattatcctcttctctaacaaagccctagtacgacacttttagttcattagttcttcttatcctatggataccattcgtaccaccaccatcacccgcgtgcaacaaacaaccccaacaaagaaaaccaagcccaagaagaagaactcaccccacccagtgaaggtagtctacatatccaaccccatgaagatcaagaccagcgcctccgagtttagggctttggtgcaagagctcac

SEQ ID NO: 24639 - DNA, 190 bp, Glycine max
  Clone ID: 701100530H1
ccacaacccttacaccacgaccttcatatttgcagtgctagtctgcttatttcttcagctatgtttttgtcaagaacacttggacgaacactctttgctgctgctgccagatcaaaacaatatgccactacagcagctgctgctagcagagaaggacacaacccccttcaggagttttttgaggcagaca

SEQ ID NO: 24640 - DNA, 227 bp, Glycine max
  Clone ID: 701100533H1
tccgagagacaggatggagacaacagaggaaaaggtgccggtcggcctgccagtgcaattgtattacggtcgagacaatgcaatatcaaaggggaatgatccctcctaacacggtgtttggagatccaaagggcatccccatccagcagaccatttacagggacactcctgctcctttcaactgcccttactgcggtgacaccgctctcactaccgtcagatcaaag

SEQ ID NO: 24641 - DNA, 264 bp, Glycine max
  Clone ID: 701100534H1
acgcactctaactcaggcaaaagccactgttactgttgctaaagtgtttggaggaatggaccgtggagattttcttacattggtggcttctgctgaggctagcagtgaacacccactggcaaaagcaatatcgcaatacgctcgccattttcatttctttgatgagtcttctcccaccagtgataccaagagtgcttctgaggactacaagtcagggtggctttatgatgtctcagacttctctgctcttccaggaaggggcat

SEQ ID NO: 24642 - DNA, 263 bp, Glycine max
  Clone ID: 701100535H1
aggattccgaggatgttaatggttgcctcatggataaacataaacctgtggtggcaccttctttggtttgtgaaaaggttgaagatcatgtaaacggagaagatgatagtgattccaattctttgttgcctcctcggagaggtggcatgtccagaaactgtgaaaagactcgccggaaagtgcagtggaatgataggaatggaaacaagcttgctgaggtgttggaatatgagccaagtgatgtcagtgattcagaagatgag

SEQ ID NO: 24643 - DNA, 263 bp, Glycine max
  Clone ID: 701100537H1
atcagaggagttaccgtgatacattgttttcatttcctgtctctagaattttctatccgctcatccccctcacaaattagggtttctgcgaatcttttatcgtctgaaatcgaatccaacgtttcagccatggtttccgattcaatcgccgccgtaccgattccctccgccgcaaacaccaagaacccggggaagaagaagaggactaacaggtccgcgaaattgaagcagtacaaaatcgatgcgcgccgcgagcaatggtt

SEQ ID NO: 24644 - DNA, 259 bp, Glycine max
  Clone ID: 701100538H1
cgaacggcaattaatttacaatggccgtcacgaaaagcctctcaatcttcctcttcatcgcaatgagctgcgtcgccgcagctcaggcagcgaacttcaacatcacaaataactgcacctacacggtgtgggccgctgccgtgcccggcggcggcgcaaggcttaaccctggcgaatcgtggaacatcagcgtgacgaacggcacaacaggaggacgcatctggggtcgaacaaactgcaccttcgacaacgcgggacg

SEQ ID NO: 24645 - DNA, 266 bp, Glycine max
  Clone ID: 701100539H1
cacacatacatacatacactagtagtctggtgtgaccttcttttatccttttgcttttttcgtgtgcaattaacacacacacacacaaaaatgatggcatgccaagattggccagagccagtgattcgagtccaagccttggctgaaagtggcttaaccacaatccctgaacgtttcataaagcccaagtcccaaagacccactaataataacaactatgctccaaaggtcaatttctctcaaattggtcatcatgagaacaccac

SEQ ID NO: 24646 - DNA, 267 bp, Glycine max
  Clone ID: 701100541H1
tcctctcatgagccgtggttaacaaagcgagtcggacctaagctcactgttcaaaggagatcaaactttgtgatcaagacgaaccacacttcttcaattagtgcagaataccgtgataatagaggaggtggaggtggggattttgctgctggctttcttctgggtggtgcagtttttggaactctagcttatatctttgctccccagtttgtgatgcagatcagaagatctctgctaaacgaagatgagtatgggtttcgcaaggcc

SEQ ID NO: 24647 - DNA, 275 bp, Glycine max
  Clone ID: 701100511H1
cccaatcaaacaatggcaatgataaataggcttcaagaagagaaagcagcaatgcagatggacagccttgcagtatcaaagaatgatggaagaacaatctgagtatgatcaggaggctttgcaactcttgaatgagctcatgatgaagagggagaaagagaagctagagctagaaaaggagcttgaagtatatagaaagaaggttcatgaatatgaggcaagagaaaagatgatgatgtcaagaagagatggtagcatgagaagcagaacttcat

SEQ ID NO: 24648 - DNA, 245 bp, Glycine max
  Clone ID: 701100476H1
ctctctacaagttacaatcattaggagagacaaaaaaaaaaaaacacttactcttgaatattcatgaccatgaaggcctctatagtcctatactcacctttgggaaggggacccctagtttccatggtgcaattaggcaaactcatactaacccaccacccttcactttccatcaccattcttttcctaaccccacccccaaaccaggcaacacccacttccccaagggctttaactggggaggc

SEQ ID NO: 24649 - DNA, 248 bp, Glycine max
  Clone ID: 701100477H1
ctatacctcccaaggtttcctctctacctcgttaccttatctcactccctccctcgtcgaacctactccaaaaccaccctcttacgcccacccaaatccactctcacaacctcacaacccttaaccgttaacccttcccccacagagctatccctcgagaagctcttcgttccgccggagaccaccgtgtccctcgaaagttcaagagtcttgaacggttctaacattctgctgagtaactacgccaa

SEQ ID NO: 24650 - DNA, 265 bp, Glycine max
  Clone ID: 701100478H1
agaagaaccaacaagaggggtattgagactgagattcaagtaatggggaagagcaaggttcttgtggtgaggggaactgggtacatagggaggaggatactgagggcaagcctggcactgggccatgagacctacgtggttcagaggccagagttgagacctccagatagagaagctgcagaggctcctctccgtcaagaagcaaggtgctcatctcattgaggcctctatcaatgatcacaagagccttgttgatgctgtgaag

SEQ ID NO: 24651 - DNA, 266 bp, Glycine max
  Clone ID: 701100479H1
tctccctccaaattttccttcattctcacgctccgccgtggtttccgccggcggctactccctatccaccgcgcatccatcccgcttccctctcctcgcttttctcacaaaacaaaaaaaattaaaaatttctccgaagactgtgtattatcgttatcgttcactgagttaggttttgctgttcttcctagggttttattgtgtccaataacaagaggagggggaagagaaacaaaacaataaaaaaaaaagattaaaaggcaaaa

SEQ ID NO: 24652 - DNA, 256 bp, Glycine max
  Clone ID: 701100483H1
tggaaatgaaagcctagaagaaaattatgatcaaagtagaaacctagtaaatgacaacggtagctcaaaatgttacatacctagcttcaccaatgaattctgggaaagttctgcattcaatgcccccaaaacagaaaatgaagatgaaatcatgttttccacttcaaatggtttggaatctcaggaaacagatttcagctatcaaaatcatggtttgactcaccatttgagtctacctagctcttctactaagatg

SEQ ID NO: 24653 - DNA, 264 bp, Glycine max
  Clone ID: 701100485H1
gaaaacagagagcgaagaaggagaagagatcagaaaaatggcgtccaaagctccaaagaaggccaatctcctcgatcaccactccatcaagcacatcctcgacgagtcagtctccgaggtggtaacgagtcgtgggtttgtggaagacgtgagattgagcaatgtgaggcttctcattggggcaatcatcatcgtcattgctctcttcgcccaattctacaagaagaagttccctgaaaatagggattttctcatcgcctgcat

SEQ ID NO: 24654 - DNA, 260 bp, Glycine max
  Clone ID: 701100486H1
ttttgctccaaaatcagaacaaataccaaagcttccatctgatttgcagagagttttttctcaagggaccaaccaaggacactatagagagagaaagtggttctgttctttctgctcttgattttgcactggtggattgaaggttgtgtcgttcctggatcgttctttttctgttgcggagacatgttggacggtcgttcctgcgttgttccgaggttgttttccggcacttgccaggcggagaacgaatggtcttacat

SEQ ID NO: 24655 - DNA, 267 bp, Glycine max
  unsure at all n locations
  Clone ID: 701100488H1
actcgagncgaatcggctcgagcggctcgagctggtcgtctttaaataccaagagatctgaaaacctaaatgtatcagggcatgtagctccgtgtgagaaacatcctggaagccttttggaaggatttactcagacacagattagtacactggctgtgcgggataagttgttgattgccgggggttttcaaggagaacttatttgcaagtatgtagatcgacctggtgttagcttttgttctagaactacttatgatgacaatgcaa

SEQ ID NO: 24656 - DNA, 253 bp, Glycine max
  Clone ID: 701100489H1
aacaacttttcatacatgaccatgctgcctcggtcatttactatgattgcaacaataataatcattgttcttgctcaaacacttgtgggggtgatttcacttcctgaagctgataaaataagcaatttgccgggccagccacaggtcgaatttcagcaatattctggttatgtcaccgtggatgatcaacatcagagagctttgttttactactttgttgaagctgaagaagaccctgcttccaagccattag

SEQ ID NO: 24657 - DNA, 265 bp, Glycine max
  Clone ID: 701100491H1
ccaacctcttcctccgactaccgttctacatcctattttgaccttagtccatgggaaactgcagcagcggggctccagcccccaccacctactccgacgaccatccccaccacaacggcattaccgtcctccctcccaactcaaacccttcaccccaactccccaagcccccaccgacctcctcctcctcctcctcgctgggccgggttttgggccggcccatggaggatgtccggtccatttacatattcgggcgggagctggg

SEQ ID NO: 24658 - DNA, 259 bp, Glycine max
  Clone ID: 701100492H1
tcgagctttattggcaggtttatctgagcttagctttgacccaagacctgagattaggaagagtgccttggaagtcctgtttgaaaccttacgtaatcatgggcatctcttttcactacctttatgggaaagagtatttgagtctatcctatttcctatattcgattatgttcgacattctattgatccttcagggagtagttcaccgatcaatgaagtagaggctgatggtgagcttgatcaagatgcttggctttac

SEQ ID NO: 24659 - DNA, 259 bp, Glycine max
  Clone ID: 701100494H1
atttggactttttgattgcccttggaattgtgtccatttgtctctgctttggtcacatacacattaatccttctttgaattgaactttctgagctacacgtaagacatcaggttcaagtctaggtcatggggatcaaacataagtgccacaaccataatgtttgctttattttgtggcagtgtttttgtttgataatcctttgatctgggtttaatttcaattttctcgtttgagtttttgtccaccatgtgatgagta

SEQ ID NO: 24660 - DNA, 266 bp, Glycine max
  Clone ID: 701100495H1
cctcgagccgattcggctcgagagcaaatacccctttattaatcttaaaggttttattgtagggaacccagaaactgatgattactatgactataaaggccttcttgaatatgcatggagccatgcggttatatcagaccagcaatacgacaaagcaaaacaagtatgtgattttaaacaatttgattggtcaaatgaatgcaacaaggccatgaacgaagtcttccaagattactcagaaattgacatatacaacatttatgccc

SEQ ID NO: 24661 - DNA, 268 bp, Glycine max
  Clone ID: 701100496H1
ctggatcttctgggtgggacctttcattggcgctgcacttgcagcactctaccaccaggtcgtaatcagggccattcccttcaagtccaagtgattcaatcaaaccgttcatgcttaatcaagttgggaacaacaaaaaaaatcaaaacaatgtttctgggtttcggtttcatttcatcaagatgatctgtttacctttttttttttaattttaatttaaagtctttgtattttgtatgtaaagatgtaaaattatgattattaggtg

SEQ ID NO: 24662 - DNA, 269 bp, Glycine max
  Clone ID: 701100503H1
gcaaaattgaaggcttggttccttctctccgtgcttccccgcacgtgacaacatgggaaaacaatgcagtcagatctcgagcaacagccgcaggtgaattcctcgggtttaactcggtaccgatcggcgccgagttcttattgaccgaacatcattgaccgcgagttctacgagcacgtcttcaaccgtccctcgagtcccgaaacggagcgagtgttctcacgcttcatgaacagcttaaacagtgaagaagaagattcgctccatca

SEQ ID NO: 24663 - DNA, 269 bp, Glycine max
  Clone ID: 701100504H1
agctggaaggttcggccagcattggcctgtggtaacaccattgttctcaaaacagctgagcagactccattatctgctttgtatgcatcaaagttgcttcatgaggctggacttcctcctggcgttctgaatgtaatatctggctttggtcctaccgctggtgctgccattgctagtcacatggacatagataagcttgctttcactggttcaaccgaaactggaaaagttgtccttgaattggcagctagaagtaatcttaagcctgt

SEQ ID NO: 24664 - DNA, 269 bp, Glycine max
  Clone ID: 701100506H1
cttcgccactctctttctcatgcccgttgtgtccgacgcaagggttgtgtgacggagagcaatccttcgccgcacggcgggcgtggcgctctgccttccgaaggtggcagcccctccgacctcctcttcctcgctggcggtggttcttcccattaacattctaaagtagtattagccattaacattacatcctacaccttcaaaagttctctctattagcggtttctggtttcttttgttcttcttctttggtagttgttaggtttggt

SEQ ID NO: 24665 - DNA, 270 bp, Glycine max
  Clone ID: 701100507H1
actgactctaattttaaccaccattctcacttctcactcttcaatcacaatgttaatctcatcacctaaacaacccttcctcctcgtaaccatcttaatcaccatcttgttattgggcccaggcccaatcctcgctcgcaacgcccacgtcatcaatttccggtcaccgaacctctacccggaatccctaacgtgggacccacgcgcgcacacttcctcctcggatccctccgccagcgcatcatcgccgccgtctccgacgcgggggtc

SEQ ID NO: 24666 - DNA, 273 bp, Glycine max
  Clone ID: 701100508H1
cctcgagccgaatcggctcgagaaacaacagagaaagtaagcaagacaccgaagagaagaaaaaatgccgtgcctcaacctcaacaccaacgtgtccctcgacggcgtcgacacctcttccatcctcgccgaagccacctcctccgttgccaacatcatcggcaaacccgcggcctatgtgatgattgtactgaaaggatcagtacccatagcttttggtgggaatgaacagccagcagcttatggagaattggtgtccattggtggtcttaa

SEQ ID NO: 24667 - DNA, 272 bp, Glycine max
  Clone ID: 701100509H1
tacggctaatgctctgactttgcctcttgtgattaagaagcttttgacggtgtctgagtcgagttcaagctttgcggttccggttctttggaaacttttttgtgacaagaatgaagaaggggtgttgattgacgcgcttcaaatgggagtgtttcataaactacttgttttgttgcaagtgggttgtggtgagggaaccaaagagaaggctacggagttgttgaagttgttgaatggttgtaggagcaaagccgagtgtgttgattcgtcct

SEQ ID NO: 24668 - DNA, 272 bp, Glycine max
  Clone ID: 701100510H1
cggacccacaggacctaagctcatttggcgaaggtgttccctgctttggaagcccttgaagatggtttgccaaatgagttgttgggacaggagggacccacaggacctaagctcaaaagaaattggcaaggtgatgaggtttgaaatggaagacttggagaaccgtggcattattgacaccatgcaattaaaaaaggagactttaatttggttggtttgcactatctgttttgtatttttatagggttcacaacaaacatgtatttcttaat

SEQ ID NO: 24669 - DNA, 265 bp, Glycine max
  Clone ID: 701100475H1
gggatagaagcagttatacaccctcgagaatggtgaaattccaggcaaaattataaacgcatttttttctctccgtccaaacggcagatccgatccgccctacaatcccctctcagtttttctctcgaggatccggtgaaacgacatggcgatggtggaccagcctctgtatccgattgccgttttgatcgacgagttgaagaacgaggacattcagctgcgcctgaactcgatccggaggctctccacgatcgcgcgcgcgctc

SEQ ID NO: 24670 - DNA, 269 bp, Glycine max
  Clone ID: 701100438H1
caacaaactcacaaaatggataagcaaattttctttcttcttccccttctcatcatgtccctcttcactgtttcaatagccgctgaatcttccagctcatgccccatggatctcaactatgttgagacctttccatgggactcttcatcctgcagagaccctgttgacaagaaccactgctgccaagtcttgctaagtgtaattggcataggactttcccaacatctcaaacaaacttccttgtttcaacttcccaatgaaaccatttc

SEQ ID NO: 24671 - DNA, 267 bp, Glycine max
  Clone ID: 701100439H1
tatcaaactcattctgtcttttcttctatttttatttctatccaatcatccatggccgaggaaccccaaaaaccagcctccgctgaagaagtggtcgctgttcctgcggagaacccaccatctgaagccgaagctgaaaacatcgaagcagagaaggcccagagtggtgtagaagacaagatttcccagtcggtttcgttcaaggaggagaccaacgtggttggcgacctccccgaggcgcagaagaaagcccttgatgagctcaag

SEQ ID NO: 24672 - DNA, 270 bp, Glycine max
  Clone ID: 701100440H1
caagcactcctggtgttagtgcctcccttttcaatgcattggctaaggccaatataaatgtccgtgctatagcgcaaggttgttctgagtacaatattactgttgttgttaagcgagaggattgtataaaggctttacgagctgtccattccagattttatctctcaagaaccaccatagcaatgggcattattggacctggattaattgggagcacactacttgaccagctaagggatcaggcctcaaccctgaaagaagaattcaaca

SEQ ID NO: 24673 - DNA, 258 bp, Glycine max
  Clone ID: 701100442H1
cttctcgattcgcttccgtagccgggcgatttgaggacccagaaaagaacgaaccgaacgttttatattttttcggataatcaatcgaagatgtctcgttgcttccctttcccccctcctgggtatagggcacgtggcgacgccttgatcgaatcgattaaggtttgttgagccgtttcgattttgcgttcgtgcgcaactctctctgcatgttgtttcttgcataaatctgccaccccttttgcgattaaggtaaat

SEQ ID NO: 24674 - DNA, 264 bp, Glycine max
  Clone ID: 701100443H1
tctcgagccgaatcggctcgaggtgaacttgacaaattatcaatggctaacatcacggcaaatacttcaaggttgtggggattttttattgcctgttattgggtttcaattgttacgtttgctctcctatggagggcttacaaacatgtgtcatggctgcgagctgaagctcttaagtctcctgatgtgaagcctgaacagtttgctatagttgtgagagacatacctcatgttcctcaaggtcagactaggaaggaacaggtt

SEQ ID NO: 24675 - DNA, 270 bp, Glycine max
  Clone ID: 701100446H1
gtttgcgtgaagcaatggaagggaatttgccacagggaggtataattcaaggtgggacttcttttggtggctttgatttgccgggatcaattcgggttcagcatcaagcacaacatccccattccatgcatcaacatcaacctcatccgcgacaagggtcttctgtacattccgccgttcatgatggttttccacttacaatgggaaccatgcagaactgtgaccaaaccatttcattggctgactttagtaaaggagacagaagtaaaa

SEQ ID NO: 24676 - DNA, 270 bp, Glycine max
  Clone ID: 701100447H1
tgtgacatggtgtaaccaacttgaattgctggctcaccaagccactggctgctttgtgacacattgtggctggaattccaccctcgaaagccttagcctcggtgttccggtggtgtgtttgccacagtgggctgaccagttgcctgatgctaagtttttggatgaaatctgggatgttggtgtgtggcctaaggaggatgagaaaggaattgtgaggaagcaagagtttgtcaagagtttgaaggttgtgatggagggtgaaagaagccg

SEQ ID NO: 24677 - DNA, 278 bp, Glycine max
  Clone ID: 701100449H1
gtttcagtttcggatctctctcttctttcacaccaatttccagcatttgaaacatggcagattcaaaatcaggattgaggaaaccagtgttcaccaaggttgatcagctttgcccggggaccagtgggcacactttaactgtgaaggtggtcaatgctaagatggtgatgcagagaggtcgctctgatggtcctcaatctcgtcaaatgcgaattgctgagtgcttcgttggtgatgagactggaatgatcatattcaccgccagacatgatcaagtg

SEQ ID NO: 24678 - DNA, 270 bp, Glycine max
  Clone ID: 701100451H1
ccgatgggtgcctacaagtatgtttcagagctatggcgcaagaagcagtctgatgtcatgcgcttcttgcagcgggtgaggtgctgggagtataggcagcaaccttccattgttcgtctgacaaggtctacccgccctgacaaggctcgtcgcttgggcttcaaggctaagcagggctatgtgatttaccgtgttcgtgttaggaggggtggccgaaagagaccagttcccaaaggtattgtttatgggaagcccacaaaccacggagtt

SEQ ID NO: 24679 - DNA, 270 bp, Glycine max
  Clone ID: 701100452H1
cctcgagccgaatcggctcgagctcaatcaccccccctcgcactcactcttcccttcctctggcggcgacaatgtcgactcatgctaggaagaggctgatgagagacttcaagacgctgcaacacgacccgcctgcagggatcagtggtgccccccaggataacaacataatgctgtggaatgctgtcatatttggtcctgatgatactccatgggatggaggcacgttcaagttgacactccaatttactgaggactatccaaataaac

SEQ ID NO: 24680 - DNA, 263 bp, Glycine max
  Clone ID: 701100453H1
tgatttttgagtatcttgaacgggaccctccttacagccgtgagcctttggctgataagataatggatcttgcttttcaattccctgaactggtgacccttagaagttgtgatatactaccatcaagttggatatctgtagcctggtatccaatttacaggataccaactggtccaacattaaaagatctcgatgcttgttttctgacataccattctctttatatgcccatgggaggttcacaaagagtccaggctcccatg

SEQ ID NO: 24681 - DNA, 267 bp, Glycine max
  Clone ID: 701100455H1
gctgaaactgacatccaagactatctccaactcttcttcctctggttactctccatcatcgccgttagagccatactcaccaaactccgccacaagcctcgccgtccaccgggcccacggtccctccccatcatcggccacctccatctcatctccgccctgcctcaccagtctttccacgcgctctccacgcgctacggccccgccgtgcaagtcttcctcggctccgtccccgccgtggtcgtttcgtgcccggaactcgcgaag

SEQ ID NO: 24682 - DNA, 234 bp, Glycine max
  Clone ID: 701100457H1
aagagatagagacaaacaagcaaagcaaagaaggttcacgttcacgttctgttctgttctggttcacactttcacgagcccatcaccgactctctgcacctgcaactgcaacttccaacttcaacttcaaccactgcaagcttagctctgaaagaaaagaaaagaaaaagaaaatatctccatttggtttggttggtgaaagttgaaaccttttcacgagctcaagtttgtagt

SEQ ID NO: 24683 - DNA, 267 bp, Glycine max
  Clone ID: 701100458H1
gggaagaggtcgagtttcacagcagcaatagtgtacgtcaaggctcagaaatcaaaagcctacttcaagagatatcaagtcaagttcaagagaagaagagagggaaaaaccgattaccgtgccaggattcggttgattaatcaggacaagaacaaatataacactccgaaataccgatttgttgttcgctttagcaacaaggacattgttgcacaaataatatctgctagcattgctggcgatattgttcttgctgcagcatatgca

SEQ ID NO: 24684 - DNA, 267 bp, Glycine max
  Clone ID: 701100460H1
agaacacacattactagaaatttagaaaacatggcagcggtggccggagcatcctcgtccgtgattaaggtggctgcgctttcgggttctttaaggaaaggttcttacaacagaggcctcattcgttctgctattgagctaagcaaaggtagagttgaaggccttcaaatcgagtacgttgatatttcgcccttgccccttctcaacaccgatctcgaggtaaatgggacctacccgcccgaagttgaagcctttcgccagaagatt

SEQ ID NO: 24685 - DNA, 265 bp, Glycine max
  Clone ID: 701100461H1
cactttgcgttttctgcgtcatctccgattccccgacaatggccacccaaatgagcaagaagagaaagttcgtagctgatggagtgttcttcgctgaactgaacgaggttctgacaagggagttagccgaggacggatactccggcgtggaagttagggttacgccgatgcgcaccgaaatcatcatcagagccaccagaacccaagccgttctcggtgagaagggaaggagaatcagggaacttacctcggtggttcagaagag

SEQ ID NO: 24686 - DNA, 267 bp, Glycine max
  Clone ID: 701100462H1
taaaatctgtattttcagtatgcacaacagggataggcaatggttcatgcaaatgtaaaaaattgtcttcactcacattatcattctccccctgaagggaatttttttgaaaaaaaggttgatgttctagaaaggtaacatccatgctaacacaaagcttttttgtaataggattaaatactctgtatcccttgtggttggagaatatccaacaaagatgtacttttctgcccttgggtccagtttagaccgagatatggagggtgt

SEQ ID NO: 24687 - DNA, 270 bp, Glycine max
  Clone ID: 701100463H1
cagctaccttgcaaagcaacacatggcttctacagacaagcatggccgcactgcatacagaacatcatcttcaactccagctcctgcgggtgttgattactttaaatttgatgttatcctaaggtttgtgttatttgcagcatcactggtagctgttgtggtgatcgtcactggtaatcaaacagaggttattcttgtgccacagcctgtgccatggccagccaagttcagatacacaccagcctttgtgtattttgtagctgcattgtc

SEQ ID NO: 24688 - DNA, 271 bp, Glycine max
  Clone ID: 701100466H1
aggttttgtcttgccagacccaaagaataggttgctcctttcgagtgtcctcatcttggtttcattgatttctggtgcttatttcgttggtaatgcattctttccaaaggaatacaaacaaagattagcacgatgggggctaattcatacaatgtcacattcaaaatttaatgcgtgcaagagacaatgcttgccttttggaagtgaggcattgcctgaaggaatgattgctagaacatctaacttggaaatgcggcccttatgggactct

SEQ ID NO: 24689 - DNA, 91 bp, Glycine max
  Clone ID: 701100467H1
ctaccctgtaaatggaggaggagaaacagagaggcaaagggcacagactattgctgatgccatcaccattacaaggccacatagcaccatt

SEQ ID NO: 24690 - DNA, 261 bp, Glycine max
  Clone ID: 701100470H1
cgattactcaggataagaaggattacactttgtcgaatagggagatgcttcaggctgtggagtaccatgccgagagtgggttgaaggagtgggctactgcggtggttaagcttgaggtgaatgaggaaatgggtggtgctgatgtgcattttgaagcgtttcagatgagtgatgtgtgtgtgaggttgtttaaggaagggtggttcgagacggagatcaaggaggacgatgatcccaagttgtcgaagatgaagaaggatg

SEQ ID NO: 24691 - DNA, 267 bp, Glycine max
  Clone ID: 701100472H1
agaacagaggcgtcccacgccgtcttacgtcgctttcaccgattccgagcctttgatcggtgatgtcgccatgaatcccactaacatcgtcttcgtgaggcaattccagctccaatctcttccaatcccttccacgcgtaatcacttgcgtgcaaactgaatttgttgatattggacagttccctcacgtagcaattttgaagatgtaagtgtagctctgactgatatcttgaagctacctctgatggataaaagcaatggctgcag

SEQ ID NO: 24692 - DNA, 221 bp, Glycine max
  Clone ID: 701100473H1
cgtactcggaatcgcgttttcgccgcggcgtgccggagccgaagatgccgatctacgacgtgcgaatgaacgtgaacagggaggacgagttcccgttctacgtgcagctggtctcgtgggacaaggagaacgtctccagcgaggcttaggaggcggcgcgcatcgcatgcgacaagtacatggccaagttcggcggcaaagatgccttccagctgcgcgtg

SEQ ID NO: 24693 - DNA, 256 bp, Glycine max
  Clone ID: 701100474H1
gccaaggctgctcagagtttaaatggaaaattggagattgctggcaggactatcaaggtttcatgtgtaacagatcatgttgcaagccaagatgcaactgcaaaatctgcagacttggatgacgatgaaggtggattgactttaaatgctcactcaagagcattgcttatgcagaggctggctggcgcagaccctgcaagcataggtttgcctgttgtgaatggctcagttcctgctcagcaggctatcagcttgc

SEQ ID NO: 24694 - DNA, 270 bp, Glycine max
  Clone ID: 701100437H1
tttcaaattattctgtggcaaggagagaagaaaagatcatagaaagtggtgattcttcgaatattgaagagagaaatatggggttgagattgaaggagacattctacttgtcccatggagcaccaactcttgccgtagatgattcaatccctgcgtggaacttcttcaattcgtggaaggagcagtttccgacgagaccctcttccattcttattatctccgcccactgggacacccatgttcccaccgtcaacgtcgttcaccagaatg

SEQ ID NO: 24695 - DNA, 276 bp, Glycine max
  Clone ID: 701100409H1
ataatttgttcatgtttgttcctccacattaacaattttcaaaaaaatcactatatattatgatgagaaatttatacattcaaaattgtcaggtcatctctatgttaaaagtgatgtatatggatttggcgttgttctgctagaaatgctaacaggtagggcagctctagacacaaatcagcccgcgggtatgcagaatttggtggagtgcactatgtcatgtctacatgacaaaaagagactgaaagagataatagacccaaggatgaacgagca

SEQ ID NO: 24696 - DNA, 82 bp, Glycine max
  Clone ID: 701100410H1
ctcgagccgtttcacttttgttcacctttgtttatcacctttgttcatttcgattattcttaagtaaagcatcgttcttttt

SEQ ID NO: 24697 - DNA, 264 bp, Glycine max
  Clone ID: 701100411H1
cttcgatctccaaattcccgtgctttgagtttttggtttttgctcatatgtgctcaatgattgttcaactgttatggtgctttctttagttggtggttcttgtctttgaaagatttttaattaactgggttgttcagaacttgtttagggaatcaataggcacagcttgtcattatgttccagaccagatagcatggaggagcctcaatgtgcaatcaagaaggatgccactgaattggtagggaataccccaatggtatttct

SEQ ID NO: 24698 - DNA, 274 bp, Glycine max
  Clone ID: 701100413H1
ctcgagccgctccgatggctaatccctcactcttgttcttcagtctcctcctattatccgacaccgtagccgccgccgaacggatcgacgatgaagacgaccttctgatccgtcaagtggtgccggatgcggaggaccaccacctgctcaacgcggagcaccacttctccgccttcaagacaaagttcggcaagacctacgccacgcaggaggagcacgaccaccgcttccgtatcttcaagaacaacttgctccgcgccaagtcacaccagaa

SEQ ID NO: 24699 - DNA, 275 bp, Glycine max
  Clone ID: 701100414H1
agaagccgcttctggtctagagagcgtcgagaagctcatcagactcctctcccaaacccaagcccaagcccaagcccaccatcaattcaacaacaacaatatctctagtaatgaaatcgccatcgccatggactgcaaagccgtcgctgacgtggcagtctccaagttccagaaggtcatttccctcctcggccgaacccgtaccggccacgccaggttccgacgcgcccctctccccaaccaacaccaacacacccaacctccctccgaaccgc

SEQ ID NO: 24700 - DNA, 237 bp, Glycine max
  unsure at all n locations
  Clone ID: 701100415H1
agcacatctggagtggaaccttgatggtcttctggagaaaatttgggaatatctcaacttaactcgtatttatactaaacctaaagggatgaatcctgattatgaagaccctgtaatattatcctctaagaagaggacagttgaggacttctgcgatcgcattcacaaggacatgcttaaacagtttaagtatgctttggtctggggttcaagtgcaaaacacaagcctcanagagt

SEQ ID NO: 24701 - DNA, 273 bp, Glycine max
  Clone ID: 701100416H1
ttcacattttagaagaataccccctcttttgctgcatcagaggagttgtaaattaagagcatggctgcacaagctcttgtatcatcatcttctcttaccttctcagcggaggctgcaagacaaagtcttggaccaagatcactccaatctccatttggcttctccagaaaagcctcctttcttgttaaggcagctgctaccccccctgtcaagcaaggatcagacagacctttgtggtttgcatcaaagcaaagtctttcttacttggatggc

SEQ ID NO: 24702 - DNA, 280 bp, Glycine max
  Clone ID: 701100417H1
tattgcttcttcccttttgtcttcaaaggaagagaattcgcaatttgcaattttgcattggcgggcactgaaatcgagagagacatccgaggtccaatttgtcagaaccaatagctcgaagcttctcgtgggctgctccgatggatcgctccgaatattcgctccggaaacggaatcttcctccgacggctccaagtcctacgccttggagaagaacctcgccgggttcgcgaagaagcccgtgctctcaatgacggtggtggagtcgcgagacttcctc

SEQ ID NO: 24703 - DNA, 296 bp, Glycine max
  Clone ID: 701100418H1
acgtaattccgctctagtgcagagtatagcggcaacataccaggatcattatgacttgtggctgccttggagccaaatcgataaaggcaaaacgcccttcttatgttcctggtgaaattgatggctatccgctagataatgtcaggcaattttctgataaagaactgagattggcaactgataattataatccaaacaataagataggacgaggaggttttggaactgtttaccagggaacattaagagatggaaggcatatagcagtgaagactctctcagtttggtcaaagcag

SEQ ID NO: 24704 - DNA, 277 bp, Glycine max
  Clone ID: 701100419H1
cggctcgagctcaacaatggctcatctcttcagagacctctcattgggccactccaagagagactccacgccgccgctgccgccaccgccgataatgcctcccaagcccgccgccgtcaccgccgccgacgaccttccctctccgctcggccaactctccgccagtctctccgattccgacctcgcgctaacggcgtacgagatcttcgtcgccgcgtgccgcacctcctccggcaagcctctcagttccgctgccaaccactcctccaccaattcg

SEQ ID NO: 24705 - DNA, 267 bp, Glycine max
  Clone ID: 701100422H1
gttgattattgtggttaggttttcactattcatacggggcgaagaggttaaaaaggcaagagttatttcccacaaccattgtatttttttggttgagggcgatgcgtctagctagctagggaaaattaagctgtaattagctaatactgttgagaatagtaactgctgattgaaattatcttttgcttttttcttcatctattgtatgtttatataaaccgttacagaaggtgttcatctatgaaggaattagaattttttttcaaa

SEQ ID NO: 24706 - DNA, 270 bp, Glycine max
  Clone ID: 701100423H1
tggcaggaagcagcattaacagaggagaaagatggtctctcaatggaatgactgctcttgtcaccggcggcactcgtgggatcgggcactccatagtgagtgacttggctgcgtttggcgctgcagtgcacacctgttccaggacccaaacagagctcaacaaatgcttacaagagtggcagagtcaggggtttcaggtaactgggtcgctctgtgacgtgtcctcaccaccccagagagagaagctcattcaggaagttgcatccacct

SEQ ID NO: 24707 - DNA, 272 bp, Glycine max
  Clone ID: 701100424H1
tatgctgccccttcttctggggctcgaagccaattgggtcggaggctgttgaggggcacgagcagagtttggccatgaaggtctggaactttgcctgccctgatgcccccggtggaatcgataacccctggatcaacccctgtgttcctggggcaccctctttggccactcttgcctgctctaagttgctcgttactatcactggcaaagacgagttcagagacagagatattctctaccaccacaccgttgagcaaagtggctggcaaggt

SEQ ID NO: 24708 - DNA, 157 bp, Glycine max
  unsure at all n locations
  Clone ID: 701100425H1
cagnaacaagggtcagatccacnaaagccctcagcggcaaccggttttccgttgagctatagccattcaacaacgtattcgacctangaggcttcctacgctccagtcccacccccccagcccaaacctcttgtcgattggtccaccggcctctgtg

SEQ ID NO: 24709 - DNA, 270 bp, Glycine max
  Clone ID: 701100426H1
gtggattggggctcagacccattggttgatgtggggctacctgcttgagttcaagggtaaaaatgtcttcttacagctttgggcggcaggcttactgtttctagcagccaacatatttatcctcgtcatgattattcgtcaccataaatatgcttcagttttcaaagctttagaatatgctaactccaagaatgcagctaagcttgaatgatggagagggacatagaagaggaggttaccgtacaggcattctgctctaatgaaataatg

SEQ ID NO: 24710 - DNA, 269 bp, Glycine max
  Clone ID: 701100427H1
ctcattggtacttctcatatatttgtggtgctccctcttcagtttttggtaaactaaacttcttcaattcaagggggtatcaaaatctgctggttggtttcatcaatctgatggaggaaaatctgcctcccggatttaggttccaccctacagatgaaagactcatcacatgttatcttacaaggtaggtttctgattctagcttcacatccaaagctatagcagttgttgatctcaacaagtgtgaacttggggacctcccaggtaag

SEQ ID NO: 24711 - DNA, 259 bp, Glycine max
  Clone ID: 701100428H1
aagaaagtagcagatcctccatggcctccaccaaggaacgtgaaaacttcgtctacgtcgccaagctcgccgaacaagccgaacgctatgaagaaatggtggaagcaatgaagaatgtggcgaactaaacgtggaattgacggtagaggagcggaaccttctgtcggttgggtacaagaacgtggtgggtgctcgtagggcttcgtggaggattctttcctcgattgaacagaaagaagaagctaaagggaacgatgtg

SEQ ID NO: 24712 - DNA, 271 bp, Glycine max
  Clone ID: 701100429H1
ggaataatgggtatctgcatatccgttgcagaagaagctcatgatgatgataatgtgacaatatttgaagcaagaaaggttctaaatgggagtcagagactttgctctgtttactccaaacagggtagcaaaggactcaaccaagatgctgcctctgttcatgagggttatgggatggaggatggaacattttgtggagtttatgatgggcatggagggaatggacacaaagtgagcaaaatagtaagcagtcgtttatcttccctcatac

SEQ ID NO: 24713 - DNA, 274 bp, Glycine max
  Clone ID: 701100431H1
gccggggagcggaggtgcggcgtcggcgcagaacgaagccatagaccggcgagaccgtctccggcgactggctctggagaccatagacttggcgaaggatccctatttcatgcgcaaccacctcggaagctacgaatgcaaactctgtctcactctccacaacaacgagggtaactacttggcccacactcagggcaagcgccaccaaaccaacttggccaaacgtgccgctcgcgaggccaaggacgcccccgcccagccccaaccccacaag

SEQ ID NO: 24714 - DNA, 275 bp, Glycine max
  Clone ID: 701100432H1
cggctcgaggcaagctggtgctgtgaggcaccttgtggacttaatggacccagcagctggaatggttgacaaggcggttgccgtcttagcaaatcttgccacaattccagaaggaagaaatgcaattggtgatgaaggtggtattcctgttctggttgaggttgtggagttgggttctgcgagaggaaaggagaatgcagctgcagctcttctacatctttgctcacatagtcccaaattttcaagcaaggtgcttcaacaaggagctgtcccgc

SEQ ID NO: 24715 - DNA, 287 bp, Glycine max
  Clone ID: 701100433H1
gtttcgatgaagaagagaagatcggggattaacgaactatgaattgaactttctcaatggctcagattcccaacctagacaatgctcctgtcaatctcacatccattagggagcattcgcaaaaagagctcctcaacatcctcaagaatgttcgaggaaagaagtgtttagtcattgatccgaagctcggagactctctctcgcttatcatacagacatccattctcaaggagcatggagttgaattgcggcatctttccggggacccaattcaaactgactgcagc

SEQ ID NO: 24716 - DNA, 98 bp, Glycine max
  Clone ID: 701100434H1
gttcttgcgcggagcggatgttcagatctatggagcaggctcatattattaagcgaaagcctctgagatccgcggtggcggcgtgatggaaatgaagt

SEQ ID NO: 24717 - DNA, 272 bp, Glycine max
  Clone ID: 701100435H1
cacccccaaccactccccatctcttcgctctttttcttcttagaaagagagtgtttgaattgtaattatatactatattgctctatatatactaaaactcactaacaattgataaagcagagattctgcttcaagtgtaatcatccccatcctttatcaccttatctcatcaacacattaatatactgctaatctctatcttccttctctattctatattcaataacccacaaactaacaaataatggctctgttttcacatcaccgacact

SEQ ID NO: 24718 - DNA, 266 bp, Glycine max
  Clone ID: 701100436H1
gtcttatcattattagggtttggcgattcacagagaaagagaaatgggagaacgaaaaggaatcccaattgctctggggctcttggcgatgctcctcttcttcattgcttcttcctcttcctctcacctcgttcgtccttccgatgacgccgacgacgcgatcttctacgagtcattcgacgaggattttgacggacggtggattgtgtccgacaaggaggattacaacggtgtctggaagcatgctaagagtgatgggcatgatg

SEQ ID NO: 24719 - DNA, 274 bp, Glycine max
  Clone ID: 701100408H1
ctcgagccgctcattcacacattcacagttatactctctctctctttgtcgcttggatcaatgatctcatctcaattttcagatatgtcgacatctgataagccagaagtggtggaaaggggtagcaaggatgaaaaacacaaggaagatgatcaagaggaggggaagggtggattcattgagaaggtgaaggatttcattcatgacattggtgagaagattgaggaagctattgggtttgggaagccaactgctgacgttactgcgattcaca

SEQ ID NO: 24720 - DNA, 91 bp, Glycine max
  Clone ID: 701100373H1
ctaatttctcgaaaggtagggttttgcagagcctcgtcctcctctcacggtttcttctttttatcttctcacctttcttcttccactgatc

SEQ ID NO: 24721 - DNA, 257 bp, Glycine max
  Clone ID: 701100374H1
cttgaaggtcattgctgagaatatgtctgcagaagagatccaaggcttgaaggcaatgtttacaaatatggacactgacaagagtggtacaatcacctatgaagaacttaagtcaggattgcatagacttggctcaaagcttacagaggctgaagtgaagcaacttatggaagctgctgatgtagatggaaatggctcaattgactacatagaattcatcactgctacaatgcatagacacaaattagaaagagatg

SEQ ID NO: 24722 - DNA, 258 bp, Glycine max
  Clone ID: 701100375H1
gttaattgttaaatcatggtaggtatagaaagaaaactcaatttggcttcttacaattgcaggctgttttgtgggatcgatgacatatattgtctcttcttggggagcttgaacaacttgtccctactcaacaagcaatatggattgtcaaagagtactgatgaggccatgtttgttattgaagcttacaagacactccgtgaccggggtccataccctgcagatcaagttgtcaaggagcttgatggcagttttgcc

SEQ ID NO: 24723 - DNA, 259 bp, Glycine max
  Clone ID: 701100376H1
catgagcctcttcggtataggcagaaaccagagaacattccgcccgaaaaaaagtactccttctggaagtaagggagctcaacttagagaacatattgatgccacgttgggtagtggaaatctgagggaagcagtaaagctacctcctggggaggatttaaatgagtggctagctgtcaacactgttgatttcttcaaccaggtgaatctgctttatggtacccttacagagttctgtactcctgagaattgtcggacg

SEQ ID NO: 24724 - DNA, 261 bp, Glycine max
  Clone ID: 701100377H1
aatatattccattctctctgtgtatgtcgctacctctcgcttcaagatgcagatcttcgtcaaaacctcaccggcaagaccatcacccttgaggtggaaagctctgaaaccatcgacaacgtcaaggccaagatccaggacaaggaaggaatccccccggaccagcaacgtctcattttcgccggaaagcaacttgaggacggccgtacccttgctgactacaacattcagaaggagagtactcttcacctcgtcctccgt

SEQ ID NO: 24725 - DNA, 261 bp, Glycine max
  Clone ID: 701100378H1
cctcgagccgaatcggctcgaggcaattttcatttttctctctcccctagtcaaagggattcaccgttcttcttcccaggttatttagaaaagcaaaatggtgaagatttgctgcattggtgctggatatgtggggggtcctactatggcagtcattgcacttaagtgcccatccattgaagtcgctgttgttgatatctctaaatcccgcattgcagcctggaacagcgaccagcttcctatctatgaacctggccttga

SEQ ID NO: 24726 - DNA, 266 bp, Glycine max
  Clone ID: 701100379H1
agaaccgcagcttcagcccaagctggagcccgcgccagagcttgtgagcgctggcgctgaggattccgagaagtcgcatgtcagtgatgtcacggaggttcgccacgttgccatggctgaggcaaacgccggttgttgcacttccgttttgaaacggaagcgtggccgtccggccaagggaagccgcgttccgaaagggatgactccgccgtcgaggcagaaaaaggaagaagaggatgtttgcttcatatgcttcgacggtggaa

SEQ ID NO: 24727 - DNA, 268 bp, Glycine max
  Clone ID: 701100380H1
cctcgagccgctcgagccgaatcggctcgaggaaggaacacgtcgtcttctttcaccccgacatgggcattgccggggcggacgcctggtcatcgatgccgcagtcggcctccagaatcgcgggcacaaggtcaccatcttcacatcgcactgcgacccgcaacactgcttcgatgaggcgcgcgatggtaagcctctactacaacacctcggaccacccgccgcctatgcctggccacgcagctgagacctgacgcgcgcacaaagg

SEQ ID NO: 24728 - DNA, 260 bp, Glycine max
  Clone ID: 701100381H1
caagagtacatgatcaaagttcgggaaaatgaagcgcaagacaaggatatgaagtcaaagcgtgaggccagatggaagcgtttggaagatatgggaggcatgaaagctacaaccaacgaagcagttctagtttctcccagaactgcttctcataccccttctggcaaggcaagtagagctcagttggagtgataattgatttttggcattgcagagttgaaaagccataacttatgctgcattgcattatgctgcataag

SEQ ID NO: 24729 - DNA, 262 bp, Glycine max
  Clone ID: 701100382H1
agatgatacttcaagtatatccaacagtgtcaggtctcttacaaccatgccaacagagtttacaggttccgttcagcctgaaaattattcagaagaaagcactttgattgtggataactcagatgtgaaaaatgatcttatgcctgcagttatggtcaagggaaaagatcaattttctaaccattatacatcatcttttgatggaaatgcatgcttattgattgatgaagcgcggcaggaaaaggctaatagtcatatgcag

SEQ ID NO: 24730 - DNA, 238 bp, Glycine max
  Clone ID: 701100383H1
cgaccttgcttttcaattccctgaactggtgaccctcagaagttgtgatatactaccatcaagttggatatctgtagcctggtatccaatttacaggataccaactggtccaacattaaaagatctagatgcttgttttctgacataccattctctttatacgcccatgggaggttcacaaagagtgcaggctcgcatgccacgtcctactgacatggacgatgtccataaaatgtct

SEQ ID NO: 24731 - DNA, 92 bp, Glycine max
  Clone ID: 701100386H1
gatttacgagaagcaccagcgcgtatgggtaggagcggtcaacgaggaagacgaggaggcgcgtgcgtacgacatcgccgcgcagggttccg

SEQ ID NO: 24732 - DNA, 252 bp, Glycine max
  Clone ID: 701100387H1
caaaactcttgacgccacaaaggaacaacaacatagtactgtaccgtttatgccatccttgcaagatgttaatgttaccatcgataaaacaaaaccccataaagaagtcgtcgctaacctcgtccaaggggaaaagaggaataggaatagcagtttagtgagaattgaagaagacttggctgaagcaagagtagctattcgcagagcgatactaaagagaaacttcacatcagataagaaagagatctttgt

SEQ ID NO: 24733 - DNA, 260 bp, Glycine max
  Clone ID: 701100392H1
ccttgatcttccttcctctgaaacaagaaccacaatggagaattcgaccgaagaatcccatctccgatcggaaaactccgtcacttacgagtccccttaccctatctacggcatgtcattctccccctcccacccccaccgcctcgccctcggcagcttcatcgaagaatacaacaaccgcgtcgacatcctctctttccaccctgacaccctttcggtaactccccacccttctctctccttcgaccacccttaccctc

SEQ ID NO: 24734 - DNA, 258 bp, Glycine max
  Clone ID: 701100393H1
cggctcgagcttgtatgttactttaataggcgtcgttcctcttggctgagaaaacaagtaacagtaaagcgcctattacgcgaactgcaggagactcaactgtccctctatatccctacaaagaaatagaaagagccacaagttttttctctgaaaaacataggcagggaactggagctttcggcacagtttatgctggacaccttcacaatgatgagtgtgttgctataaaaaagatcaagtatagagacaccaaca

SEQ ID NO: 24735 - DNA, 261 bp, Glycine max
  Clone ID: 701100394H1
agccaactcggccgagtcggaagcgcttgccctctttgacctttccaaagaacagaagaactactctcatcccaaaaactggcctctcggatacggcggcgacgacgaagacgaagacgagctcgccgagtcgttccgcttcgactcggcgtgttcgaccgagtcgaacgagttggcactcttttccctgcgcaagtttgcgcgcgaactggagatgctgggtttaaagatcgttgatgggttaacaaaggacttggggtg

SEQ ID NO: 24736 - DNA, 261 bp, Glycine max
  Clone ID: 701100395H1
caatcagcggtgatttttgtttataataggaggatctgatgtactcgctcgtggatctcagctatattcacgatcatgatggcccttgaaaattctgaaaatatgcaaataaactgtgaggcatctttaaaatgcctccagggcaagggatttccttgcaattttcaaagtaatgggaattctatggaaggctttacagagcttaaaaatgagcctggtactcaccctgctggggatgttgctgaccctaactgtcactta

SEQ ID NO: 24737 - DNA, 267 bp, Glycine max
  Clone ID: 701100396H1
ctcacgcatttcctcgttttcttcttcttcccttttctctcttctcactctttctccggcgacgatctcagattccggtcactcctctcgccggcgatcccttattcctccgtcctccgtcgagtcctttccgattcgaatcgttcccagccttgtgccaccatgaatcccgaatacgattatttgttcaagcttttgctgattggagattctcgtgtaggcaagtcatgtcttctcctgaggtttgctgatgattcataccttgac

SEQ ID NO: 24738 - DNA, 289 bp, Glycine max
  Clone ID: 701100401H1
attctgggcacctaaaagttgcagactttggggttagcaagttgctggcagttaaagaagacaagcctctaacttgccaagatacttcctgccgctatgtggctcctgaagttttcagacaagaagaatatgacactaaagtggatgtattttcatttgcactaattctgcaagagatgattgaaggctgccctcctttttctgcaaagcaagacgatgaagttcccaaggtatatgctgcaaaagagcgtccacctttccaagcaccagccaagcgttactcccatgg

SEQ ID NO: 24739 - DNA, 273 bp, Glycine max
  Clone ID: 701100402H1
ccgtgatggaagagtggacaaagtggaagccttgaagcactacaaatttagcttagcatttgagaattctagcgatgtagattaagtaactgtgaaatgtctgtacaatgccattgttactggatctaaaggtgtgggtgtgattacagctgttgtcagagataactaagaaagtcttgcacggatactgatatgtagctgggatcaaggaactatgacttgtatcagagctgcagggtcgctccgtatgtatttttaaaatccgaggattga

SEQ ID NO: 24740 - DNA, 276 bp, Glycine max
  Clone ID: 701100404H1
aaagcagatgagcagcaactcaggaaaagtggtgtgtgtgactggtgcttctggtttcattgcttcatggatcatcaaactgcttctccaacgtggttacactgtcagggccactgttcgcgacccatctaaacccgaaaaggttgatcacttgctcaaacttgatggtgcaaaggagaggctacatctctttaaggcagatctgctggaagaaggttcctttgactctgcttttgagggttgtgatggtgtctttcatactgcttaccccgttca

SEQ ID NO: 24741 - DNA, 282 bp, Glycine max
  Clone ID: 701100405H1
tatgcagctcgagattcattattggtaaagcattaatctccacgtggccttgccttatcatgtgcaattgttgtgcatatagataagcacatccaaatgtctgctttgacttagtttcatacactccctcctgtttgattacgaaaatgtggaagagaaggggatttgaagaagaagcagttcaattgataaactcagatttcagagacctaagtctagctggcataggctttggagcctctttcttcggattctttgctgccattgctgctatttatctgt

SEQ ID NO: 24742 - DNA, 270 bp, Glycine max
  Clone ID: 701100406H1
gccatttaattggttcttattgtgtttgtgagtgtgctataaatccttcgtggtttttggtgaccctttgggttctatagtgagtgcaaggtaacccactttggattggaaggttgtcgcaatggggaaggttgtgttgttgtttctttgcatggtgttggtggtggtgtctttggcttgtgctgattcaattgagaagcttgaggttcagaagcacttgaagaacttgaatagacctcctgttaggtccatcaagagtcctgatggaga

SEQ ID NO: 24743 - DNA, 266 bp, Glycine max
  Clone ID: 701100407H1
attgcatctgagctgtgttgttggactattgtagagaaggtgataggcatgtatattcttttcttcctcttttttcttttcaccccttctcccttctcccttctcatataaatttttctgttcaatgaaaaactgagtgtgaaataatcacatgctctccttgcttctggcactctttcacttgattcatcataccaagcattgaagcaaaaaaaaaaaaaaaaagcgacaacaacgaaagcaaagaaaagagaccaaaatgatgg

SEQ ID NO: 24744 - DNA, 241 bp, Glycine max
  Clone ID: 701100372H1
cagaaagagagtgaataaatccagcattgttctgttctctgcaacattctccactctcaaccatggcttcaaagcttttactcatcagtgtcttcgtatttgatttgagtgctcattggactatgccgaggctgatagagcagacaagaatcacagctcagtgttgtcacggaccatgtcaagcgttacaattactgtgtctataactctggtatagcaactggctatggtagtggagcat

SEQ ID NO: 24745 - DNA, 266 bp, Glycine max
  Clone ID: 701100341H1
cttttgatttttggtgacaagtcaattaaaattgctgactttggacgttgcccgtattgaggtgcaaactgaaggaatgacacctgagactggaacataccgttggaccgctccggagatgatccagcataggccttacacacaaaaagtggatgtatatagctttgggattgttctatgggaactcatcactggtatgcttccatttcagaacatgacagcagtacaggccgcatttgcagttgtcaacagaaatgttcgcccaa

SEQ ID NO: 24746 - DNA, 263 bp, Glycine max
  unsure at all n locations
  Clone ID: 701100343H1
cgctgttctttcaaatcgtaaccgaagaatgaagatggtgcgctgctgtcggtgcttcgcctgagtctcattccgtttgcgcccactatcacaggttgtgctgaggcttaactggttcttgaagcatatttcagagttttatcagagaacaaatgggttatattgggactcaccctgntgcagctctgcacagatataaatatagtggagtagatcattcctatgtggccaaatatgtactacaacccttttggagtcgcttg

SEQ ID NO: 24747 - DNA, 269 bp, Glycine max
  Clone ID: 701100346H1
caagcgccaatggccaagggtcgcaaattccccaccacgaccggaaccgagcgcttcttgggattgggaatgggaacaacaacaacaacctactcctcccagggctccgccgccgccgaccggtcggagttctgggaagaggacgtgtggtccacggcggaacaccgtgacggagatgtgaatgcctgccccggcgagtgggaggcatgcgcgccgccgcggcgtcggaacaacagggagaactgcaacgtggggggtttgtcgctggc

SEQ ID NO: 24748 - DNA, 271 bp, Glycine max
  Clone ID: 701100347H1
cgaaatgcagctgttgttttccaaaagtgcgacttggtggcccgaaagcccatggataaacagaacaacatggtcactgcccaaggacgagaagatccaaaccagaacacaggaacttcaattcaacaatgtaacctaacaccaagttcggatcttaagcctgtcgtgggctccatcaaaacttttctagggcgcccatggaagaagtactccagaactgttgtgatgcagtcgacattggacagccacattgacccaacaggatgggctg

SEQ ID NO: 24749 - DNA, 268 bp, Glycine max
  Clone ID: 701100349H1
ctgacaatgcaaggtggttcattggtttcagggtataacaggggtgatccagagttgagagaaatagtttcagctttgacacacgtggtgtcttcagggtctggccagaggagcaccgaatggacccagcaaagtggttttcctatgatgtctgcttcttctctttcacgtttgtctgctttctcttcttcttctccttctccttcttctggagcctcttgggttggccacaaaagaggcagagaagaagaagagaatagtacttcac

SEQ ID NO: 24750 - DNA, 264 bp, Glycine max
  Clone ID: 701100350H1
ctaccataaatgctatagctgttgaagcttacaaaaagtatataacggtttctctcattcgtcatggacagttctcaaccagtcttcctaagtattcttcttcgactgctcaaaggaacctgaagaacttttgtcagccttacgtcgaattggctaatagttatggcactggacaaattgaagaactagaggcatatgccagggcaaatgcagagaagtttgaatctgacaacaaccttggactggttaatcaggttgtatcat

SEQ ID NO: 24751 - DNA, 267 bp, Glycine max
  Clone ID: 701100351H1
ctcatatccttatcctgtttctttcaatggaagtcatttctgcttctagcttgaatcccaacgctccgatgttcgtaccactcgcctatcggacggtggaggatttctccgaccagtggtgggacctcgttcactcctccccctggttccgcgactactggctccgcgagtgcttccaagatccccagttccaaaacgacgacgctttcgacttcgactttgacctagatctccaagatgaagatgaaagggaacgaaaggaaggga

SEQ ID NO: 24752 - DNA, 261 bp, Glycine max
  Clone ID: 701100353H1
tggggttcaacacgcggaacgaccttctctcgcggttcacgggatccataaacgacgacgtttatttaagagacattgtggtgagttttctcttagcgggccgtgacaccatcgcctccgggttaatcggcttttttatgttgttgtctaaaagcccggaggtggaggagttgattacagaggaggcgggccgggtggtgggcccgggccaggagtttccttcgtttgaacaaatccgcgaaatgcattacctgaacgcgg

SEQ ID NO: 24753 - DNA, 265 bp, Glycine max
  Clone ID: 701100354H1
cgcatccgttgcctgaaaaattgttcagaagcttggacactgtaactcgtatgttaagattcacagcaccttttccacttcttgcatttcctgtgtacctttttagtaggagtcctgggaagactggttctcactttgaccccagcagtgacttgttcgttcccaatgaaagaaaagatgttattacttccacagcttgttgggctgctatgttgggattgcttgttggattggggtttgtaatgggtccaattcaacttcttaa

SEQ ID NO: 24754 - DNA, 260 bp, Glycine max
  Clone ID: 701100356H1
ctttcttccaacctctcaagtccaaactacccctttttcttctcccaccaacttcaccgtcctcttcctcgatcatgtctcacttcaagggcaagtaccatgatgagcttattgccaatgctgcttacattggcactcctggaaagggtattcttgctgctgatgagtcaacagggacaattggcaagcgtttggccagcatcagtgtagagaatgttgaatccaacaggcgtgctcttagggagctgcttttcaccgct

SEQ ID NO: 24755 - DNA, 262 bp, Glycine max
  Clone ID: 701100357H1
cgcagattctctctttcgccgccgttgcagtggcagtggcagtggcacgtcctctcacgagtcaccctttttctcaagggttactcgtgctatcatggagtttgttgcttgtgctaaccctgataataatgatgagatatctgattctgaaacacaacccaataagtggatgagaaagaagtctatggtgtgggactacttcacagtggaaacggttggagctggatgtaccagggcctactgtaaacagtgcaaaaaatca

SEQ ID NO: 24756 - DNA, 261 bp, Glycine max
  Clone ID: 701100358H1
cgagcagcagcactgaggatgagacagaaagctatgtcagtagcaacaacttgttgagatttgaaatcccagatatgctacgtatgaatacattaattatatgagtactcattcatacgtagcatataattaatgtattcacatcatgaaacaattgtgtcgaacaaaaattgatttatctggggctagctagctagctagctagataattacaatggatcgattgtgttcatacttgtaacattttctaaatttttaata

SEQ ID NO: 24757 - DNA, 262 bp, Glycine max
  Clone ID: 701100359H1
cagatattgaacgctacacatcaaaaataaatcgagccaacgcatttaattgtaagtgtcttcatattacctgtgttctgtcacatctttttgcataatattggcactaagtcttttttgatagaaattgtgaagatgtactgttatcattgtatcaactatattgtgcccttctttttttatttgatttggcaaacacggctacttttctccaaataagatggatcatttgtattgccggctttgtgcacaattatctact

SEQ ID NO: 24758 - DNA, 265 bp, Glycine max
  Clone ID: 701100360H1
actcgagccgaatcggctcgagcatctgcatatctttctgcaagtaccagttctaacgtacacccacttgttattgctgcaactcctcaagaaccaaaccagtttgctgtaggactgtcggatggcggagttcatgtctttgagccccatgagtctgaaggaaaatggggtgtgcctccacccattgagaatgggtcaacgagcaatatggcagctacttcagttggagcttcttcagatgaagctcagagatgatccatgtcag

SEQ ID NO: 24759 - DNA, 269 bp, Glycine max
  Clone ID: 701100363H1
ccataagaagacagatgaaataaacagattaaatggactttacaagcggatgttatccaattggggggttaaattatttgaaggtgagggaaagatagttggtccaaatgaagttgaggtgacacaattggatggcactaaactgtcctactcagcaaagcacatattgattgcaactggcggtagagctcaacgtccaaatattccaggacaggagttgggtataacatcagatgaggcgctaagtttagacgatcttcctaaacgtg

SEQ ID NO: 24760 - DNA, 281 bp, Glycine max
  Clone ID: 701100364H1
agtcgcacttgatggcatactataccgcaatgttagatctgtgaattacaccaggggaagtttcatctttcccggtgctcagccctatccccatcgcaacttttctgaggaagttgctattcttgatggctagtttggcaagcttagtgcaggaagcaatgcttatattttgggtactcaagaccaatcacagaactggcatgtctactctgcttctgcagattctgcaactccatgcgacaatgtttacactctagacatgtgaatgactgggctggata

SEQ ID NO: 24761 - DNA, 269 bp, Glycine max
  Clone ID: 701100365H1
tcaatcctagaactcaacctggcttcagcaaaggatctcaaagacttgaatatattctcaaagatggatgtatatgctgcgctttcactctccggcgatcaaaagaccaagactcccgtccacagaaacggcggcaccaacccaacatggaattttccggtcaagttcacttttgatgaatcggtggcgcggcagaaccgtttggccctcgaaatcaagatccgctccgagcgcgccctcgccaccgataaggacatcggccaggtcca

SEQ ID NO: 24762 - DNA, 262 bp, Glycine max
  unsure at all n locations
  Clone ID: 701100366H1
cgggattcggcgtccagatcacagatcccgttcaattttttctccgcatcccccgatcgggtttggattctgaagaaagttcaattccgcacaacttcgggtggcgagntgntgtngaggctcgngttggggatgggcaagattgtgagaggaagggggaggccgttctcgaattgttcgtcgtcgtcggcgtctccgttgtcggcgccgcgggaacgcagtcgtcgacgtcgttgacggacacggtgaggcggtcgcaggg

SEQ ID NO: 24763 - DNA, 264 bp, Glycine max
  Clone ID: 701100367H1
agaaatctggacaattttcctaaacggttgaaccagagtttcagtatgagcagatttaggaaatagaaaaattggctcctttcccccttagtttcagaaggaattgattgctcgacgactgttaattttgtaaggcacgggttcaagagatggagaaagagtcatttattcgaagcaataacaatacgaacataatgtctagtgttagagagaaaaacggaggggatgggtcgttgttgttgagggcgagttccgatagcgcta

SEQ ID NO: 24764 - DNA, 217 bp, Glycine max
  Clone ID: 701100368H1
tctctgaccttctttcttctcccagctccaatcaccacaatctcggaggcttcgaaagacctcatcatgagtcctactcgtcggatcaaacaggttcttcaggcggtgtgccaaaattcaagtccacaccccctccttctctccctcttagccataatcatcctcaaacaccaatattttctccttcttcttactttaacatccctcatgggttaag

SEQ ID NO: 24765 - DNA, 257 bp, Glycine max
  Clone ID: 701100369H1
cacgcgccaagcctccttcgccgccgccgacaagagtctcgctcattctcccaggctttccatgcattcttcccactccaacccccgcagattctcgtcggagcgcgacggcgagaatttcggcgttcgccgggatctgaaccgaaccggatcgcgctcgttcccgccgatcgtgcctcacgaagaggaattcctctccgacgccgctccgcgcaagctcggaatccggccggaggatctacgattcggaggtggag

SEQ ID NO: 24766 - DNA, 261 bp, Glycine max
  Clone ID: 701100370H1
cgaattcaaggatgaaggagcaagcttatgaacaatcaccaacactcttcttgtcagatattcaacaggtttggagaaagcttcaagacgctggtaatgagattgttgctcttgccaagagcctctctaacatgtcaagaacttcctactctgagctggtgggaattccagcacagagcacatttcaagatgagaagcaagtcgaatttgactgttgcatgaaaccagaacagacacaagcatgtgctatgtacaaaattt

SEQ ID NO: 24767 - DNA, 263 bp, Glycine max
  Clone ID: 701100371H1
cctatgaacactcattatcctcttctctaacaaagccatagtacgacacttttagttcattagttcttcttatcctatggataccattcgtaccaccaccatcacccgcgtgcaacaaacaaccccaacaaagacaaccaagcccaagaagaagaactcaccccacccagtgaaggtagtctacatatccaaccccatgaagatcaagaccagcgcctccgagtttagggctttggtgcaagagctcaccggccaggacgccg

SEQ ID NO: 24768 - DNA, 268 bp, Glycine max
  Clone ID: 701100340H1
ctttcttgtacttgtttccaactcactcatctcagcttttggcttctgtggatctgtgcaaagactcaatgaaagatactcccaccgattgtgtggttcctataactcctgaggctgtcattgagaatggggatttgcaatcccaatcccctctcacactctcagtggtcaggaaacaactcaaacgtgcctgcattgattgcgattctgaccgtatctctgttgataataataatgacaatggcagcccccgaactcctaaggatgg

SEQ ID NO: 24769 - DNA, 270 bp, Glycine max
  Clone ID: 701100312H1
gtcaccacagacattgaatctttgatgagtgccaatattggtagttctcatgttttcgagcgtgattcacatcctagtcctggaagaattgtagatagaccaggtgggatgtctcggatggatcgccgtggggatgtggtaatggaggatgacagatggagtagagtttctggtgcttttcgttctggacgtggtttggatggcattggaggtaatgtgggattccgatctggccaaggaggcaattttggtgtcttaaggaaccctcgt

SEQ ID NO: 24770 - DNA, 274 bp, Glycine max
  Clone ID: 701100314H1
cagagagagagagagagagagaagggtttgagagagatggggaggaggatactgaatgatgccttgaggagtatggtgaatgcagagaggagagggaaatctatggtggaactcaagccaatctccactgttatgtcttcctttctccaaatcatgaaacaccacgggtatatcaaggactttcaagtctatgatccgcatagagtggggaggatatcggttgaactacaaggtaggattaatgattgcaaggcccttatgcacagaaaggacc

SEQ ID NO: 24771 - DNA, 275 bp, Glycine max
  Clone ID: 701100315H1
catgtcttcagtgttttccaaagtcacactgaatagttctttttctgaacaggctggtgataatttgcctgattactctggttgtgaagtggaggaatctgagtttttttctcaggctcagccatgcaattcttcaaaaataaaggctgcacttgaggtgttgcagttgttgtctaaaccacaatgctgtgcttcccaaaacaattctgtgcagagcacttctggggaaagtactgatggccttggtagttcatctagtgctgacagaatgaaat

SEQ ID NO: 24772 - DNA, 282 bp, Glycine max
  Clone ID: 701100316H1
atcaacggctctgaggtcgttaaggccatcaagagaaagatcaatcacaagagccccgtcgttcagaccctcagccttgacctcctcgaagcctgcgccatgaattgcgacaaggtcttctccgaaatcgcttccgagaaggttctcgatgagatcattcgcctcatcgataacccgcaggcccatcaccagacccgcagccgggcttttcagttgattcgggcctggggcgagtccgaggatctcgcttatcttcccgtctttcgtcaaacttatatgagt

SEQ ID NO: 24773 - DNA, 274 bp, Glycine max
  Clone ID: 701100317H1
agcgatgagcgtggcagcggagaagatagcgacggcggcgcgacgccaagccgtgtcgctaacggacgccgccgcctcgcgaatacggcagctgctacagcagcgtcagaggcccttcttgaagctgggagtcaaggctcgaggctgcaacggcttatcatacaccctcaattacgcagatgaaaaagggaagtttgatgagttggttgaggataagggtgttaagatattgattgatccaaaggcgcttatgcatgtcattggaactacaatg

SEQ ID NO: 24774 - DNA, 275 bp, Glycine max
  Clone ID: 701100318H1
caaaggcacactcgcactcgagacaatcacgttcggaagaaccctaatccgaaacgtggccatcgggtgcggccaccacaaccagggaatgttcgttggcgccgccgggctttcgggcctcggaggtgggcccatgtccttcgtgggccaactcggaggtcagaccggcggtgcctttagttattgtttggtcagcaggggaatcgagtcgtccggattactcgaattcggacgagaagcaatgcccgtacgcgctgcatgggttcccctgatcc

SEQ ID NO: 24775 - DNA, 269 bp, Glycine max
  Clone ID: 701100321H1
gtcagttacataaactacgaaaatcatgaaattgtgttgaatgacccggaaaattgccttccgcacaagtttactgttcgcaacgattctcttattcatccttacaaatttgacgatgaagctaaaacaagtaagtcgatcttcttcaactgttcttcagttgagcatcatcacctgatatactaccagcagtcactgtcagactcacaagacatgatctcctgtccgatttatgtttctgatcttgatgacagtgtgctcagtttgga

SEQ ID NO: 24776 - DNA, 233 bp, Glycine max
  Clone ID: 701100322H1
aaaggctagaacctgcccctttttttttggcaatatctttcttttttatttatttatattattggtttctcacgtgtaatttgcgtatcaatgcttcactgcattaagtcaaagtccgagaagcagttgcacttacacataatcattgtatttttgtgtccattgcccaccaccatgcctgtattgtgattttagatcactaattttcgagaccttgtattattcgtgttatc

SEQ ID NO: 24777 - DNA, 270 bp, Glycine max
  Clone ID: 701100323H1
cggcgacttctcgatattattttttctgacagagccaccgacagagccggcggttcccgtggcggtttgagaatggccgacaagtacaacctgaagaaccccgccgtgaagcggatcctccaggaggttaaggagatgcagtccaacccttccgacgatttcatgagcctccctctcgaggaaaatatatttgagtggcaatttgcgattagagggcctcgtgatacggaatttgagggtggtatttatcatggaaggatccagttgcct

SEQ ID NO: 24778 - DNA, 271 bp, Glycine max
  Clone ID: 701100324H1
cacacacacttgcgagatctaattgttccagagaaccaacaatcaggggatggcggacgatgacaaagcggttggggaaggtgagatgaaagagacgacgggtggtaccagtccttctgggagtggaaagaagaagaacaaaggtttcttgttgcgtatttggaacgggatatttaggttacacggcgatgattttgagaagagactccagtacatttctaaagaggaagctcaagtcatgactagaatgaacaggagatcccgatcctgg

SEQ ID NO: 24779 - DNA, 268 bp, Glycine max
  Clone ID: 701100325H1
gttccaaaatatttgactcaaacaacaaggtgtttgacgacgtcctcccaggaccttgtcggaacgagtgcccgtgtgggccccagtcaaattcagccaaactatgtaatccacctggaggagtcatttgtcaaccctgttcccccagagtggttcaatctccctcgcctccatcgaaccaaagtggtggttggagcagccaaatggtggcgtttctggtggttggttgtgtgggatgcagttctctattgctagtcacggccttctt

SEQ ID NO: 24780 - DNA, 272 bp, Glycine max
  Clone ID: 701100326H1
cctcgagccgattcggctcgaggaaacactctctctctctcttctacctcttcttcttcttacacacgtattgttctaatccacaaaaataatggccttaaattacaacattgccctcgccttctctacggttctcacgctgcttctccttcccttaccaacccttggggagctcgtgcaggagcagccactagtcctcaagtaccacaacggccaactcctgaaggggcgcatcaccgtcaatctcatctggtacggcaccttcaccccga

SEQ ID NO: 24781 - DNA, 272 bp, Glycine max
  Clone ID: 701100327H1
actcgagccgattcggctcgaggaaaaacacagaatcgcgtttgcgacctgaggaatgagtacactgcagggtatcgttgatcccttcaactccatcttcatacccgataacaacaattatcacgacaccaattctacttcttcttcttcttcctcaacgaatcgaatgaaagcttctcctcctccacctcctcttcctccttcggtttcgaacgagcgcgttgcctacaagctcaaaggctacttcgatttggcgacgcaggagatcgcga

SEQ ID NO: 24782 - DNA, 262 bp, Glycine max
  Clone ID: 701100328H1
catcgtgaatgcgtataaaaggaaaataaagacattagcgtcaaaatgttgggtgtgttcagcagctccatactctcgctgcccatgacgctcgtggcgccggccccgtagtacgtcgccgaagatgacggcggcggcgctgcggaagcggttcgaggagaagaacccctccgccgtgtcggtggaggtcggagaccatgtccagctcgcttatacccactacaacgagtcaaatattcagcacaggtaaactaattgacat

SEQ ID NO: 24783 - DNA, 269 bp, Glycine max
  Clone ID: 701100329H1
cgagccgctcgagccgcgccagaatccgttgagaatggcgttgccggtagtcgtcgatccagagtaactcaaggaggtcgacaaggctcgccgcgatctccgcgcactcatcgctaacaggaactgcgctcctctcatgctccgattagcctggcacgatgccggaacttacgatgctaagaccaagaccggtggacctaacggttcgatccggaacgaggaagagtattctcacggagccaataatggcttgaagaaagctattgatt

SEQ ID NO: 24784 - DNA, 273 bp, Glycine max
  Clone ID: 701100330H1
cttattttctctctcttggattccattcctgcgtcttcatcagagccaatggaagccgcggcgacggcaacggcaacagttctcgcaccaccgtcggctttcctcggaagaccctccgtactcgccttccgttccaatcttcgcttctccactaagttaagcacttctgtagctatctccaagcatggtcatgggagacactgtgttggaactagaaggggttttgtagttagagctgcatcatttacaccagagtcatccgaaccgagttcc

SEQ ID NO: 24785 - DNA, 276 bp, Glycine max
  Clone ID: 701100331H1
cgattttctgatgggtggagtatccgctgctgtatcgaagacagctgctgctccaattgaacgagtcaaattgcttatccaaaatcaggatgaaatgataaaaagtggtcggctatctgagccatacaagggaattggtgattgtcttgctcgaacaatgaaggatgagggtgtgattgctctttggagaggaaatactgctaatgttatcagatatttccctactcaggctctgaactttgcctttaaggattactttaagaggcttttcaactt

SEQ ID NO: 24786 - DNA, 283 bp, Glycine max
  Clone ID: 701100332H1
cagaaacacaaaatggctgagcagaggcaaaacaacgtccacgttcttgttctgccataccctgcccaaggccacatcaaccccctcctccaattcgcaaaaagattagcttcaaagggcgttaaagccacagttgccaccactcactacactgccaactccatcaatgcacccaacatcacgattcatgccatcttcgatggcttcgaccaagcgggcttcgcccaaacaaacaacaacatgcagctcatcctggcctccttcagaacaaacggttccagga

SEQ ID NO: 24787 - DNA, 273 bp, Glycine max
  Clone ID: 701100333H1
agtcacttccttttccatggcccaaacactttctccctccatttattacctaccactgtcactatgaatgctctcttttgtttttcaccttcttttttttttttgggcgttcatcttcaacttcatcctaaccttttagacatcatattttcggcttagagcaaccaaaagcaagttcagattgccttgtctttcggggtagtggctgtagaggaaacactcctgttttgtgcgaatattgatattggaatagtctttctctgaaccccattt

SEQ ID NO: 24788 - DNA, 272 bp, Glycine max
  Clone ID: 701100334H1
catccagtcaatagacaaacaatatctttctctctctgtttggtttggcctcttgctgtaagaagccagccacactattacgcttccgtggaaccatcgatcccactcaatgggcctttgcaagttccacaccggttgagcttcgtgtcaggtggcttagtgttatccttaattattcttgtgacatactagtttgtatgatcatattttctcggattgtttaggaggtctagtttaattgacttgaccaggatggatgaattattataaat

SEQ ID NO: 24789 - DNA, 270 bp, Glycine max
  Clone ID: 701100336H1
gagttccagagagagaccctcttgcacaattgagcttgcctcctggatttagattttatcccactgatgaggagcttttggttcagtacctttgccgcaaggttgctggccatcatttctctcttccaatcattgctgaagttgatttgtacaagtttgatccatgggttcttccaggtaaggcagcgtttggagagaaggagtggtacttcttcagtccaagagacaggaagtacccgaatggttcacgaccaaacagagttgcgggtt

SEQ ID NO: 24790 - DNA, 90 bp, Glycine max
  Clone ID: 701100338H1
cgtaaatgaagggaattcttgagacgaatatacaacacattactgcatagatatagtagccgggagtcgctgacagattctttctggcgc

SEQ ID NO: 24791 - DNA, 266 bp, Glycine max
  Clone ID: 701100339H1
acgaaatcgcgaacagaacagcaacgttaacaatgggttctcgctacgaggtggaactgaagctctcatcggcacgcgctctcaagaacgtgaactggcgccatggcccgaaccgcccatacgtcgtcgtttgggtcgacccaagcaacaagctctcgacgcgcgtggacgaaagcggcgacactgacgcgaattgggaccaaacgctcacaattccgttgccaccaaagcctctcgaggatcaaacgttgtacatcgacgtggtc

SEQ ID NO: 24792 - DNA, 273 bp, Glycine max
  Clone ID: 701100310H1
aataggagccctgaaattattatggctccacttcttcctcctgagaattgtatgtcaaagctcattactcgatcagatgatactgaatcagtggtcaaagaaaggcttcgaatatacaatgaaatgactcagcctgtggaggaattttaccgttcgagaggaaaattattggagtttaacctgcctggaggaatcccggaatcttggcctaagttgctacacgctcttaatcttgatgattacgaggacaaacgatctgctgcagcataaaga

SEQ ID NO: 24793 - DNA, 250 bp, Glycine max
  Clone ID: 701100272H1
ctttcaacaaaaaatcgaatcccattttaattctcaaatccaagcactcgggagacagagaaagagaaagagaatggacgccattgattctgtgttcgatccgctgagagaattcgcaaaggacagcgtgaggctcgtgaagcgctgccacaaacccgatcgcaaagaattctccaaggttgccgtccgtactgcaattggtttcgtcgtgatgggattcgtggttttcttcgtaaagctcatttgcatt

SEQ ID NO: 24794 - DNA, 149 bp, Glycine max
  Clone ID: 701100274H1
attcctcccatttttattccttccttcaatctgctgcttcaatggaaggtttggcttctctcagggttccctttcagaccacccaattccactcttccagacccagaacctctattcttccatcccaagccatttttttccacaaaaga

SEQ ID NO: 24795 - DNA, 258 bp, Glycine max
  Clone ID: 701100275H1
ctattattctcgttttcaatatgcagatcttcgtcaaaaccctaaccggtaaaacgattacgctagaggtcgagtcctccgacacaatcgataacgtgaaagctaaaatccaatacaaggaaggcattccaccggatcagcagcgtttgatcttcgccggtaaacaactcgaagacggcagaactctcgccgattacaatatccagaaagaatcgacgctccaactcgtcctccggcttcgcgggggcatacaaatct

SEQ ID NO: 24796 - DNA, 248 bp, Glycine max
  Clone ID: 701100276H1
gcagtgtcccgatggggagttgcagaagaggaaggaggtcgtgcattgcgttacgcttcatgagattgatgttattaatagcagaacacagggatttctggctcttttcacaggggatacgggtgaaattcgtgctgaggtcagagagcaaattgacaccaaagtggcagagtggagagaagaaggaaaggcagagattgtgcctggtgttcttttcattgatgaggtgcacatgcttgacatagagt

SEQ ID NO: 24797 - DNA, 160 bp, Glycine max
  Clone ID: 701100277H1
gtaaggaccactcgccttctttagtcactggacaacttcttgggttggatgttggcagtgttcttgaagttaccaactgcttcccctttccaatgagggaggaggatgaggaaattgaagctgatggtgccaattatcagcttgaactgatgagatgcct

SEQ ID NO: 24798 - DNA, 216 bp, Glycine max
  Clone ID: 701100278H1
ctttttcctcttttttgaacttggcagtgttgatgagttgcggaagcctttatctaacaaagatgtgtatcagcagtttttaagttcacctgatgaggtcaagattcagaataatgtgaatgatgatctttgcaaggagaatctgcagcttgccgatgaaaatctacgaaaggaacctcgtgttgtggaactcaggaccagtataaaataattggt

SEQ ID NO: 24799 - DNA, 260 bp, Glycine max; identical to SEQ ID NO: 22902
  Clone ID: 701100280H1

SEQ ID NO: 24800 - DNA, 72 bp, Glycine max
  Clone ID: 701100281H1
cagatgttgggttaaaccagattgccctctttgagggcaaagtggcaggttgtaatggagagcaagtgctta

SEQ ID NO: 24801 - DNA, 257 bp, Glycine max
  Clone ID: 701100283H1
ctggaatccaacctgtcgatattcctgggatccaaaatctcgatgcgacagaacacatcgaaggccattcgtcttatctgtgggctacacaaaagatcttagaccaacttcaattggatacatactatcctgtatataactacatttcttgcatacccatacagtgacctttaatggaggtgttctgtttctctgcttacgttcttctgccagccgttgaagtgggatgaccctattcagaaattatgtatgaaata

SEQ ID NO: 24802 - DNA, 98 bp, Glycine max
  Clone ID: 701100284H1
aagctaccttgctagtgtccatcatcgtatctgttaggatttccaaatatacacattttctatgttattcatagagatctttaacttgaggagcatta

SEQ ID NO: 24803 - DNA, 136 bp, Glycine max
  Clone ID: 701100285H1
gcgcatttctagagggagaaacaaagccagaatcgattttagagagagaaacagcggagggcgcatgcgcgatggttcagatcgcgaggaggaatacgggacggccgtcgaaggcggatctggcgcgccgtctccg

SEQ ID NO: 24804 - DNA, 204 bp, Glycine max
  Clone ID: 701100286H1
cgttccttcacctttcttatattcaggaaagtaagatcatctgcatcgccgacgcttccaacaataacaatggccgataatgcaacaacgcaaggcagcaacaccctattttctccttacaagatggccaaattcaacctctctcatagggtggtgttggctcctatgacaagatgcagagcgttgaactggattccacaggca

SEQ ID NO: 24805 - DNA, 79 bp, Glycine max
  Clone ID: 701100287H1
caaaaaggcaaatttcttgtcttctgaggactttgagcctcctcttatcccttccaagacaatccctgatcctgatgat

SEQ ID NO: 24806 - DNA, 145 bp, Glycine max
  Clone ID: 701100288H1
gtgatttggagtttggagcgactgaactaatcattaatttgcactcgctgtttcagcttcatcacccttcttttgcatcatttatatctcttgagaaatggcacaagaaacctttctattcacatctgaatctgtaaacgagggt

SEQ ID NO: 24807 - DNA, 241 bp, Glycine max
  Clone ID: 701100289H1
cggctcgagcaaaaaaagattaatagaagatgcttttgacaaaaaatagggatgatgaatgcctttcttgttcaatatgttttttgagagaaggaggatgagtgttcatgtattaaccagcttgtaattgcccatgtatgaattttgattgaagaatgatacatatggggtgtgatttctttatgttgtttatacacatgaggtttagttaggaggcatttatcgtagactcgtagttaac

SEQ ID NO: 24808 - DNA, 120 bp, Glycine max
  Clone ID: 701100290H1
cccatatcctctatctttgtagtatgttggtctccgaaatttcatttcctttgtaattagatattgtaagacaataatgtgccagtaactaattctatgcttaatattggtttcgtggct

SEQ ID NO: 24809 - DNA, 253 bp, Glycine max
  Clone ID: 701100291H1
atggttcaaatagttccatcaaacactaatttggacaatgaagccacagctaaaatcacgaatgaaaaagatgaccctgaaaatgccatgctcccctgacaggtctagccaagaagttgttaaatctgctgaagtggagcatgataaagaggaaatgggggcacagataaaagagattctatcggttggtcctactgaagaagatttcaagtagcatatagcatattttctcgagcattgtcatacccgggtt

SEQ ID NO: 24810 - DNA, 219 bp, Glycine max
  Clone ID: 701100292H1
caagtctggtgcttcgatgaagtgtgctggttgtcaaggaactggtatgaaggtttctataagacatcttggcgcatccatgattcagcagatgcagcatgcctgcaatgaatgtaagggtactggagaaactatcaatgacagagatcgctgcccacagtgcaatggagagaatgttgtgcaggagaagaaagtccttgaagttattgtagaaaaggg

SEQ ID NO: 24811 - DNA, 234 bp, Glycine max
  Clone ID: 701100293H1
cgaaatttctgcagaggattgcttacctcaatgttggaatctatccattcacttccatcttccttattgtgtattgcttcgttcctgctctttcacttttcactggccagttcattgttcaaacccttgaagtcaccttcctagtttacctcttgggcataaccttgacccttgtcatcctcgctgctttggaaatcaagtggtctggcattgagcttgaagagtggtggagga

SEQ ID NO: 24812 - DNA, 78 bp, Glycine max
  Clone ID: 701100294H1
ctcaattccaacaacaccacaatgggaagaagaccggcgaggtgttaccggcagataaaggacaaaccgtacccgaaa

SEQ ID NO: 24813 - DNA, 261 bp, Glycine max
  Clone ID: 701100296H1
cacaaacccaatgtggatctctcagcaagaaaactcttcaagttggttcttcctcccagttgttaccttcatcatcccttttcttttacgtactttcctcaatcttttatccaaccggaacaatgattccaaaaaaccctcaccaccatctcctccaaagcttccaataataggcaacctccatcaacttggtacccacattcaccgcagtcttcaatccttagctcaaacctatggttctttaatgctacgtcacttagg

SEQ ID NO: 24814 - DNA, 215 bp, Glycine max
  Clone ID: 701100301H1
atgaatttcacaccaaacctacttatcaccaaaattacagcacctggacaccctgccattttaactctcacaaggtgcagcagtgccaaatgagtgcttttgagagccattactatccttatcctggtgagaatccacttcagtagcttccaattaatatggttgctcagggttacccccgttagcaatatccagggattttcagtattttgtgg

SEQ ID NO: 24815 - DNA, 275 bp, Glycine max
  Clone ID: 701100302H1
cttccttctcatcattctcatattattgtcgccacttcgagctcaatcagcctcgcgccctcgctcttcccttcctggtggcgacaatgtcggctcctgctaggaataggatgattagagacttcaacaggctgcaacaagatacgtttgccgggatcagcggtgcaccccaccataagcacatcatgtacgaggtctgctggcatatttggtgctgatgagaatccctgggatggaggccgttcattttgattgcccagtttactgaggattat

SEQ ID NO: 24816 - DNA, 274 bp, Glycine max
  Clone ID: 701100303H1
cctcctcgttcttcttcttccgccctttctctctctagaaccgtacggtcgtttcttcctctctcctcaaccggagacagcgtcgccttcttttctgaatctcgcggtgttgttagttctgcggcggttgtagttccggcggcgatgggacagcaatcgttgatctacagcttcgtcgctcgcggcaccgtgatcctagcggagtacaccgagttcaccggaaacttcaccagcgtggcggcgcagtgcctccagaaactcccttccttccaac

SEQ ID NO: 24817 - DNA, 273 bp, Glycine max
  Clone ID: 701100304H1
aagacataagggaacttttctctgagcttggagagttgaagcgttttgctgttcattatgacaaaaatggacatccaagtggttcagctgaagtcgtttatactagaagaagtgatgcatttgctgctcttaaacgatataataatgtacttttggatggaaagcccatgaagattgagattgttggttccaattcagaattgcctataagtgctcgggtgaatgtcactggggtgaatgggcgcaggaagaggactgttgtaatgacgctag

SEQ ID NO: 24818 - DNA, 273 bp, Glycine max
  Clone ID: 701100306H1
gggtatttgactcgtgcgtttggtcgagatctgaactgaaaccgctgctccgatctgaggccatggctgggtctgggagttccatgctgtattcctttcttctcttcacagtcattctctcacttcaagaaatgtaccgagggaaactagcatcatcagaattatcacactatacttggagggtttgttagctctatcctatttcttgtgctcctaaccttcattggaaatttgcaggaaacaattggtgcaagaactggttggggagctgtc

SEQ ID NO: 24819 - DNA, 271 bp, Glycine max
  Clone ID: 701100308H1
aggacatgcgtcaaactgtggctttcggagtcatcaacagtgttgagaagaaagaccccaccggagctaagttcaccaaggccgctgccaagaagatgtgattgcatatggccaatttgtgtagcacatgtgatcatcatcgtggttactcctttatagtagtattatccttggagagtcttaggtggcatgtgtacgtgatatgtttaagattctgacgatttcactgaagccgaaacttgcagaactaggttcttgatcggcggtggtc

SEQ ID NO: 24820 - DNA, 273 bp, Glycine max
  unsure at all n locations
  Clone ID: 701100309H1
aaaattaatcatcttacttatttattctccgaaaatggttgatttacattggaaatcaaagatgccaagttcctacatgccttccaaaactctaaaactctctctctccgacaacaagtccttaccctctttgcaactacccttccgcaccacagatatctctcacgccgcaccttctgtatgccgcacttacgactantatctccgccttcctcaactcagttagctttggtactcctcagattttcctaattggtacaacgaaccaatctt

SEQ ID NO: 24821 - DNA, 264 bp, Glycine max
  Clone ID: 701100271H1
cgaggcgagagaatcggatgcccccggagcaaaggactatgtgcatattcgaattcagcagaggaatgggaagaagagtctgaccacagtgcaagggctgaagaaggagttcagctacgagaagatcctcaaggacctcaagaaggagttctgctgcaacggaaccgtggtgcaggacaaggagcttggcaagatcatccaactccaaggcgaccagcgtaagaacgtctcccacttcctcgttcaggctggccttgtcaggaa

SEQ ID NO: 24822 - DNA, 182 bp, Glycine max
  Clone ID: 701100233H1
atttattcatcagtttttcgttcccttcacaaaactcagaaccctaactatatccatggcatcgggtggaacagaagcttttccagatttgggtaaacactgccagcaccgcgattgcaaccagctcgattttcttcctttcacctgcgacggttgccaacagatcttttgtttggaacaca

SEQ ID NO: 24823 - DNA, 259 bp, Glycine max
  Clone ID: 701100234H1
tctttccctttgacaactgcaatctaaggtagaaataacaaacacaacatgggttctttgggcacaatcaacaagccacatgctgtgtgcataccgtacccagcacaaggccacataaacccaatgctaaaactagcaaaactccttcacttcaaaggctttcacataacctttgtaaacactgagtatcaccacaaacgccttctcaaagcaagaggccctgattcccttaatggcctctcttcatttcgctttgaga

SEQ ID NO: 24824 - DNA, 259 bp, Glycine max
  Clone ID: 701100235H1
ggtagggatcccaatcactgggagaacccttttgagtttaggccagagaggtttatcagagatgggcagaatcaattggatgttaggggacaacattatcattttattccatttgggagtggaagaagaacgtgtcctggtgcttctctagcttggcaggttgttcctgtgaatctggctataattattcaatgtttccaatggaagcttgttggtggcaatggcaaagtggacatggaagaaaagtctggctcactct

SEQ ID NO: 24825 - DNA, 170 bp, Glycine max
  Clone ID: 701100237H1
cttttgatttttggtgacaagtcaattaaaattgctgactttggagttgcccgtattgaggtgcaaactgaaggaatgacacctgagactggaacataccgttggatggctccggagatgatccagcataggccttacacacaaaaagtggatgtatatagctttgggat

SEQ ID NO: 24826 - DNA, 209 bp, Glycine max
  Clone ID: 701100238H1
gagagcgagcagtttcagacacagagagaggggtttgggattggagggattgacgctgcgtctcttcctcttctctttcgatccatccctcattcctaatcctccaatccaaccacctcagcctcacactcacatatacacatatctgaacgcgtatcgtccctcctatggcttcaaagcgcatcctcagggagctcagggatttgcag

SEQ ID NO: 24827 - DNA, 168 bp, Glycine max
  Clone ID: 701100239H1
cacaacccatggccaccacctccgcattcctcctccttcccctcctcctgctgctccacctcgccatcgccgctcacggcatcggcatcaactacggcacgctcggcgacaaccttccaccgcccgcggcggtgccgaacttcctgaagacgaagacgaccatcgacc

SEQ ID NO: 24828 - DNA, 110 bp, Glycine max
  Clone ID: 701100240H1
ccggcttcaacatcttcaagggtgaacaaggaataagccaagctttgtcgctttctgcgtacccttttgaggcaaggagttccattgaggagttgcatgagctttgcaag

SEQ ID NO: 24829 - DNA, 97 bp, Glycine max
  Clone ID: 701100241H1
gggaattgggttctcttcctaaccctggccatcagcctctgtgtctccggcgcattccaaatccaaaccggaaccttgcccctccacacgctccctg

SEQ ID NO: 24830 - DNA, 202 bp, Glycine max
  Clone ID: 701100242H1
ctggttttgggtcttccatgctctttggaacaattgtcggatctctagctgacaaacaaggccggaagagggcttgtgtgacttactgcataacctacattttgagttgcatcaccaagcattctcctcattacaaagtcctgatgttgggccgtattttgggaggtattgccacttcacttctgttttcagcatttgaatc

SEQ ID NO: 24831 - DNA, 261 bp, Glycine max
  Clone ID: 701100243H1
ggaccatccgtatccccatcacagattccaacagcatctgcaccccatgcaccgtataattccagtaaacaagctgtaccttgctttttcttccaaaaaggactttgcctaaaaggtgacagatgtgccttcttgcatggaccacccactcctacttctagcacgggtaataaagtagctgctcaggttccagtgactagccaaggagttgagaatccatgttttaagaagccttttgtcagcaatgaacagtatactcag

SEQ ID NO: 24832 - DNA, 258 bp, Glycine max
  Clone ID: 701100244H1
ctttatgttaagcaatctatggttggccaagcaaaacagatatttgataccttaaagaaaaatggaggtgcaaatgaatttacatttgcaatgatgctatgcttgtataagaagattgaaaggtttgatgaagccattcaaattgcaaaacagataagaaaattgggacccttgacagagttaagttataacaatgtgcttgacctgtatgctactgctgggagacccaaggaagcaatagagacttttaaggaaatg

SEQ ID NO: 24833 - DNA, 254 bp, Glycine max
  Clone ID: 701100245H1
ctgatcacaacctttgtggttgcagcctctgctggtaacttcaaccaagactttgagataacatggggtgatggtcgtgccaaaatcctcaatagtggggaacttctcaccttgtccctagacaagacctctggctctggatttcgttctaggaatgagtacttgtttggaaaaattgacatgcaactaaaactcgtgcctggtaactctgcaggcacagtcacagcttattatctatcttctctgggggatac

SEQ ID NO: 24834 - DNA, 80 bp, Glycine max
  Clone ID: 701100246H1
gctgatttgaatcaaagtgaatatttctccccctccgggttcgattagcgtatcctggtatccctgtgggatttccaggc

SEQ ID NO: 24835 - DNA, 165 bp, Glycine max
  unsure at all n locations
  Clone ID: 701100247H1
cttctacacgccggcggactcgcgaagcacgancggccacgagacacaggctcgtcataacgcaatccgcgtacgttgagaaaatcaagagtttcgcggacagcagcagcgatgtcatggtgatgtgaattgatgatgatttttcttatgaaaacgagggcgttt

SEQ ID NO: 24836 - DNA, 262 bp, Glycine max
  Clone ID: 701100248H1
agacgactctttatggcggctataaccaatttgaacttttcttccttgtgtaaaaaaaggttttgtgtgcgtttgtgcgtgttggagttggctttttgaagtgggtgcatgctgaagttatatgtgtatgtgaaagatgaagaacaatagagataaagaaaagggtaacgacgttgaccagagttacagacagcatcacacgttgtcaatgccaatgatgttttctggtttgaacagagagaaggagatgtcagccatgatc

SEQ ID NO: 24837 - DNA, 189 bp, Glycine max
  Clone ID: 701100249H1
cttgaggccaggcaagccccactcaaccaccacacctctcctcgttcacgctacccctttctgctcttcttctacctttcaagttttaaaagtataaagatggcagagacattcctatttacctcagagtcggtgaacgagggacaccctgacaagctctgggaccaaatctccgatgctgtcctcgac

SEQ ID NO: 24838 - DNA, 261 bp, Glycine max
  Clone ID: 701100251H1
cttcccctcaccgcatcgtcttcctcttcactggatcaatattcatcccgctgtgcttgaattggataatcaaccttaaagctatatgttctgaggttgatgtgttacgtataatcttgttactgttctgagcgtatggaggggtgatacctgattgatctgggatgttgcgtagtaatctattctgattgattatggcatatccggaatgagttcaatggacatatgcttttattaatactgtgaactgtgcgttatact

SEQ ID NO: 24839 - DNA, 204 bp, Glycine max
  Clone ID: 701100252H1
gtcgtcgttgtctttttgggaatacacggtgctcctccttctgcggcccctcttcgccgtagcgttcgttctcttcttaatatccctcggttggtttgtggcgtggaaactggtgctggtgcacgtgccattggtgcaagaggttttcggcctcaagaagaaagctgttcgagtgaagcccccaactggtcgcttttccaaaat

SEQ ID NO: 24840 - DNA, 169 bp, Glycine max
  Clone ID: 701100253H1
catggtgaatgggaagccccaaagattgagaacccaaaatgtgaagcagcccccggttgtggtgagtggaagaggccaatgaagaggaatccagcttacaaaggaaaatggcatgccccactaattgaaaatcctgcttataagggaatttggaagcctcagggcattc

SEQ ID NO: 24841 - DNA, 169 bp, Glycine max
  Clone ID: 701100254H1
cctcgagccgattcggctcgagttgtgctttgttgtaagagacagaacgaggataaaagctgcccccacagtttttcatggacacaagatactcatctcctctctccctgttttccctgccaaagtaacctcgttagtgacaaacaaaaagctctctcacactgagtga

SEQ ID NO: 24842 - DNA, 267 bp, Glycine max
  Clone ID: 701100255H1
aactctctctctcaatctccttaccttgcaagcacgccacccacacactgtccaacgttaaccgatcaaaaacccatctctgtctacctttgtttgatctcaaagttggctctcacaaaaacgtgaaaaaatttcattcccgtgagattctcctccaccgatgcagattgaatttcaggaatcctgggtgtctacgatacaacagtttagatcttttcttctgcaaattttgggcactgcataaggtttggcagtgcccatgatggt

SEQ ID NO: 24843 - DNA, 236 bp, Glycine max
  Clone ID: 701100256H1
ctctctgctcctaggggttctccttcgagttgaccgaaacgatcctccaaccgcgtttgtttatgggacagggaaatggctcccaaaccgccagtacggggctggttggtggacttgaccaaggtgaagttgttaaccaggagggatttgccccaaggctctcagatcgtaagggggaaacaagccagaaggtgcactttgtgaggaacctcataagagaagttgctggttttgca

SEQ ID NO: 24844 - DNA, 244 bp, Glycine max
  Clone ID: 701100258H1
ctcgcaagcaaaaagaaagaatcccaggcgaggagaaagatggaggggaaggagcaggatgtgtcgttgggagcgaacaagttccccgagagacagccgattgggacggcggcgcagagccaagacgacggcaaggactaccaggagccggcgccggcgccgctggttgacccgacggagtttacgtcatggtcgttttacagagcagggatagcagagtttgtggccacttttctgtgtctct

SEQ ID NO: 24845 - DNA, 111 bp, Glycine max
  Clone ID: 701100259H1
gacaacggtagccgcttctcttgatgccaaagaggtgtctacctccagaactgaccagaaccaagtgtgtgactgtgatccccaaactagccatgtcttcaaatcaaaatt

SEQ ID NO: 24846 - DNA, 255 bp, Glycine max
  Clone ID: 701100261H1
ggagaaatagaaagagaggagatgtcgtcgacaaggtgggagaaggaggaggaagaagaagaagaagaggcccaaatggatatctggaagtacatatttgggtttgtggaactggcagtgataaaatgtgcgattgagcttggcatagctgaagccatagagaagcatggaagtcccatgacactatcggagatatcatcaagtttagggtgtgatacttcacatctgaagcgcatcatgaggttcctggtgaaa

SEQ ID NO: 24847 - DNA, 161 bp, Glycine max
  Clone ID: 701100262H1
cgcgcttttgatttgcaacggcttcaaggacgcggagtacatttctcttgccctggttgccaacaaacttgccctcaacaccgtgattgttgtggagcaggaggaggaggttgatttgatcgttgaattgagcaagaagctctgtgttaagcccgtaattg

SEQ ID NO: 24848 - DNA, 267 bp, Glycine max
  Clone ID: 701100232H1
gcctcagactatcaagattaaccaacctgaccaggcaaccagtggtggtcaacctgcgcaaaagtcggcttgctgtggttcatgaaaagaatcagtatctgtagaaagaggtgcacaggtttctgcaatagcactcatctgggtgctaatgttattctgatgacattataagtgggagcatgtatttgtccctctgtatctcccaactgcagatgtcttattttaaagttaatattttaaattctttgctcactgacttggtggaat

SEQ ID NO: 24849 - DNA, 209 bp, Glycine max
  Clone ID: 701100263H1
ctgctcgagctcgagccgaatcggctcgaggaaggaacacgtcgtcttctttcaccccgaactacgcatacccggggcggacgcctggtcatcgatgccgcagtcggcctccagaatcgcgggcacaaggtcaccatcttcacatcgcactgcgacccgcaacactgcttcgatgaggcgcgcgacggtaagcctctactacaacacct

SEQ ID NO: 24850 - DNA, 68 bp, Glycine max
  Clone ID: 701100266H1
ctttgccttgattttgtggtcaaataaataaggatgttacactggcctcgctcccattgcttccttcc

SEQ ID NO: 24851 - DNA, 92 bp, Glycine max
  Clone ID: 701100268H1
actttctctctctaaagaatatataaaacaagaacgaaactcatccattgttttccctctctaaaaaaactaggcgcgattaatctcacgcg

SEQ ID NO: 24852 - DNA, 169 bp, Glycine max
  Clone ID: 701100269H1
caaccaaccatcaatggcagatgtaaccacctacctccgccaccaccgcgaccccgaccccgaccccgacgacgacgaccaaaccctaattccattcccttattgggatttggactttgatttcgaccccgaattccccacaaacactttcttcttcaccgacggcgaa

SEQ ID NO: 24853 - DNA, 155 bp, Glycine max
  Clone ID: 701100270H1
gttagatatagcaagagtggttcctgctgttaaccaagtggaattgcacccaggatggcagcagccaaagttgcgcgcattttgtgaatctaaagaaattcatctatctggatattctccactaggttcaccagcagctctcaaaagtcatattc

SEQ ID NO: 24854 - DNA, 284 bp, Glycine max
  Clone ID: 701100196H1
ctaccattaacattaccctctcttttttttctccctcacgaaccttcatttcttctcccgccatggatccttgccctttcgtgaggctcacagtcggcaacctcgccctcaacattcccgttgcttctaaacccgcgctctccgttgttcatccttcttcttctccttgtttctgcaaaatcacgctcaagaattttcctcttcaatccgccgtcgttcctttcattcctccggaaagccacttccccgactcgcaggtgcatcctattgccgccacgttccac

SEQ ID NO: 24855 - DNA, 123 bp, Glycine max
  Clone ID: 701100201H1
attctgggcacctaaaagttgcagactttggggttagcaagttgctggcagttaaagaagacaagcctgctaacttgccaagatacttcctgccgctatgtggctcctgaagttttcatacaa

SEQ ID NO: 24856 - DNA, 169 bp, Glycine max
  Clone ID: 701100202H1
ctcttcttcttttgttgttctgtgtttgtgtttgttttttctctcacctgaaaatgtcttgctgcggtggtaactgtggttgcggaagctcctgcaagtgcggcaacggctgcggaggctgcaagatgtacccagacttgagctacactgagtcaaccaccagcgagac

SEQ ID NO: 24857 - DNA, 252 bp, Glycine max
  Clone ID: 701100203H1
gtaccggtcaccgaatgctaaaggacacaaaaacaattggatctgcttatgaccgctaccttcagagtgggcaactttcttcatttacttctggggaagccagtacagttgggggtcttgggttggctaggggtggtggtggattatcagaccattcactagctgatccgcctgtcatggggcgtcatgggggtggtggtccagatctagcaccaaatggacggggtgttaactatggtggtcagctacctg

SEQ ID NO: 24858 - DNA, 268 bp, Glycine max
  Clone ID: 701100204H1
gtgatttggagtttggagcgactgaactaatcattaatttgcactcgctgtttcagcttcatcacccttcttttacatcatttatatctcttgagaaatggcacaagaaacctttctattcacatctgaatctgtaaacgagggtcaccccgacaagctgtgcgaccagatctctgatgcagtacttgatgcgtgccttgaacaggaccctgacagcaaggttgcctgtgagacatgcaccaagaccaacatggtcatggtcttcgga

SEQ ID NO: 24859 - DNA, 171 bp, Glycine max
  Clone ID: 701100205H1
acagaatgttgaagcttggactgagcattgacgaggatgcaggtgaagctgatgctgaaatgcccccactggaggaggccgaggctgatgctgagggcagcaagatggaggaggttgattaaaattaaatatgatgcgtttcttgttagtagcgtctctaatgcctttttg

SEQ ID NO: 24860 - DNA, 212 bp, Glycine max
  Clone ID: 701100206H1
gagagaacaagaacataagggaaccacagcggcggtaacagaagaacaagcagagaatgggtcgagtgagaacgaagacggtgaagaaatcctctcggcaggtgatagagcgtcactactcgcgcatgaccctggacttccacacgaacaagaagcttctggaggaagtggcgataatcccgtcgaagaggctagggaacaagatcgggggg

SEQ ID NO: 24861 - DNA, 253 bp, Glycine max
  Clone ID: 701100207H1
cttctctcaacgtttgctcaccccaactcttcttccagtctccatctccatctccatcaaatttaactatggctactgaagaggttttggttgatgaaatcacttacccttccaagatcactactaccaagcccctatctttgcttggccatggaatcaccgacatggagatccactttatccatgtgaaattctatccaatcgggatttatttggaccctgaagtagttggccacttggagcagttcaaagg

SEQ ID NO: 24862 - DNA, 269 bp, Glycine max
  Clone ID: 701100208H1
cagacattgaatcccagctgaagttctttgagaccccttcttttcttgatgaagcctgggctgatgctgcattggcgtctttgctcagtgaagatgcatctcaggatgctgctggaaaccctatgaacctttggagcttcgacgacctgccttccatggcaggagtcttctgaacaccttcatatcccttttaatgtaaataaagctacaagaattgtgatcgtgatgttggtgatggaatccacagcaggaaaaccaacctgcttaag

SEQ ID NO: 24863 - DNA, 177 bp, Glycine max
  Clone ID: 701100210H1
aaaatggtcttcagtgttataatttgtgtaataaaaaagtagtacgtggtctgtactgtgttgtctgtaccaaaataataaacacatgcatgtaagggggtggacaccatgcatcctgtgtgttttgttgaagaatcaagtgaatttcagtttgaaacagtttacaaaatttgatcc

SEQ ID NO: 24864 - DNA, 260 bp, Glycine max
  Clone ID: 701100211H1
ctgaatcacttctcttactctgcaacaacgtcgttttccttcttcttcttcgtcttcttcttctttgctcatccggctcagttcgcgctctcagtaaaacgcgctcaagtgtcgccgttttctgcaaattcagctagggtttcactctcgccgcgatctctcatcctagctcgccgagttcgggttctaatcgccgcgtctaagttcactgtttctctgaatcgaagaaaggacttcgaatttcgctgctttcagttagt

SEQ ID NO: 24865 - DNA, 252 bp, Glycine max
  Clone ID: 701100213H1
ctgattaccaatccatcgtttttgaactccacataaggctaaactaaacacctctctctgcaaaacaaaaccactctcttccttccaacgaatctctgccacacaacaaataacaatcgaacatataatcaacctaagacccgcctctgattctgaacaacaaaaggctaatttggctcttttgacgacaatttttgctgacacctaaagcatctagcagcttatcaaaatggagtttaaccatacagcaaa

SEQ ID NO: 24866 - DNA, 259 bp, Glycine max
  Clone ID: 701100214H1
gccgtgcaagaagttggtgttttatttccacgacataatttacaacggccacaattccaagaatgccacttccgccattgttggaacacccgcatcgggaaacaggaccatactagcggggcagaaccacttcggtgacttggttgtgttcgatgaccccatcaccttggacaacaacttgcactcgccaccggttggacgtgcccaagggttttacgtttacgataagaaggagattttcaccgcttggcttggcttc

SEQ ID NO: 24867 - DNA, 224 bp, Glycine max
  Clone ID: 701100215H1
cgatgttattgaatttgtgacactatctggagtattaactgccaaaaagattccagccatccatatcaccagtgcctcagactcacaaaacggtgaagctcaggatggattttatattgaattggattttccggttgatcctgttacagaattcagctttgatgagagtacttcactactttctgaggcattgaacggtgcatccataattgttttaaaggggc

SEQ ID NO: 24868 - DNA, 267 bp, Glycine max
  Clone ID: 701100216H1
ccacaggagagactgcacctttttaaggcagatcttttgggtgaaaattcttttgactccattgttgagggctgtgatggcgtctttcatactgcttctccttttattatcaacgtcaaagacccacaggctgacctacttgacccagcagtgaagggaactcttaacgttcttaaatcatgtgtaaaatcgccatctgtgaaacgagtcatcttaacatcttctgtggctgcagttgcatataataaaaggcctaaaagtcctgaa

SEQ ID NO: 24869 - DNA, 226 bp, Glycine max
  Clone ID: 701100217H1
ctccctcatgggaatgaagaagaatgttacttggctgttaatcctccatccgatcgtattccagatatagaaatgcacccaactgagccacactggttgaatgacttcagcggggtgataaaaagtgtttatggacctgttacagctgcaaaaactatttatgaggatgaacaaggttacttgattattatcagttctgccctttgtagatcttcaaggtgtgaaa

SEQ ID NO: 24870 - DNA, 260 bp, Glycine max
  Clone ID: 701100218H1
gtacagcatttttggagcaccccatatcagacgatatacttcagttactctttgaagtctccaactcttctaacttggaaaagtccttagagattctcattcagaatgccaaatccgattctgggcgtttggaactagcttctaaaaagattcttcctgcagtacttaatatagttcactcactcactcatgcttcacaccaccatcagcgtaatcatattctttctttgtccttcaaagtcctcagaaacttgtgtgct

SEQ ID NO: 24871 - DNA, 166 bp, Glycine max
  Clone ID: 701100219H1
cattggtgtccctgagcccttgtcagtgtttgtggacacttatggaactgggaagattcctgacaaggagattctgcaaattgtgaaggagaatttcgacttcagacctggaatgatcaccattaacttggaccttaagaggggtggtcataggttcctcaagaca

SEQ ID NO: 24872 - DNA, 206 bp, Glycine max
  Clone ID: 701100220H1
cggctcgaggtttcatcaactggaacatttgtagaactaagcctcttctctcccagccgcagtgcaacccctccaggatcgcctcctcttctaggttggcctatgcgatccccaacacaagttattggaccatagaggcaggcgggaaactgaatatgttgggtgaatatcaattttgtggaaaaaagggaaaaaaactgattggt

SEQ ID NO: 24873 - DNA, 211 bp, Glycine max
  Clone ID: 701100221H1
caaccttcttgccctctctcatcagagaaggaaagcttttgataaagaaaagaaacagaaagaaccttgtaattttggcttgaaaagccatggccagggagcaaattcaggtgctgaacgcgcttgatgtggcgaaaacacaatggtaccatttcactgcaatcatcattgctggaatgggcttcttcaccgatgcatatgatctattctg

SEQ ID NO: 24874 - DNA, 178 bp, Glycine max
  Clone ID: 701100222H1
aaatccttcaaacatcgttttatttttcttctctctaaactaaaaaaaatgaagggcaccatagttctacaccctgccatgggcaggggacacctagtccccatggtagaacttggcaagttcatatacactcaccaccaccaaaacctccccatcaaaatcctcctcccttcgccgc

SEQ ID NO: 24875 - DNA, 237 bp, Glycine max
  Clone ID: 701100223H1
cttgtttcttttttgtcggagaaaataataataacaatatataacgtcggttgaggagatcgcagtcacagaagaggaatgtgtttgacgcagaaacggcgtcgtccttggtgaaggagctgagggacaacttcggttcgggaaggactcggagttatgaatggagagtgtcacaagtgaaggctctgttgaaggcggtggttgataacgaggaacagatcgtcgacgctcttcgtt

SEQ ID NO: 24876 - DNA, 150 bp, Glycine max
  Clone ID: 701100224H1
ctttttcttcccatttcacccctcgtctttccttgtttccggtgagggccaaccacaacatatgttaaacaaggaacaacctccaaaacataacatcctacgccaaacaaaactttgacctccttcagatctatacccttctctctctct

SEQ ID NO: 24877 - DNA, 238 bp, Glycine max
  Clone ID: 701100225H1
tttcttctttcctctttccactcttggtcttatcttcttcacaatcccacaaccactccttgttataaatcagattttttttttctcttcttacagatccaaacatggccgaagaacaccgatgccaagctcccgaaggtcacagactctgctccaacaactgcggcttcttcggtagccccgccacaatgaatctctgttccaaatgctacagagacatccttttgagggaagaaga

SEQ ID NO: 24878 - DNA, 265 bp, Glycine max
  Clone ID: 701100226H1
caagtcttcagatccttctgttactggtgttgagcttgtgcagctaagaaatggtcaatccacaaatgcagagtcatctgcagaaaataatggccgtgataatattactaaagatccattgctttcaattgatgctcgaccttcccgtacatggaactcaatgcctgcaaactccctaactaatgataacctaggtcttcaacgacatcgctcaggaggagagtggggagatattttagatgtcatctcctcacagaaagaccca

SEQ ID NO: 24879 - DNA, 262 bp, Glycine max
  Clone ID: 701100227H1
ataaaatattgtatttgtattttggtactaatccagttcctcgtgggaaacttgaagatgatgatgatcatccacaacaaacaaaacctctaatttgatttttcggtttcattcgtatgtattgatggacccggagcagacgttcatacgcgtgcaggagaggttttcgcagatgctgactcccaaagtcagagttgctttggagtatctctacctattcatcgccataaccttgttctgcattctcgttgttatgcatgcc

SEQ ID NO: 24880 - DNA, 250 bp, Glycine max
  Clone ID: 701100228H1
cggggttggaaatgagacaatggcttttcctccgaagattctctctgtggtcgatgaagaaggaacctgacttagaatccgcactctcacgcaatcgccgttggatagtcaacaaccaaatcaagaacatcatcctccgctaccccaacaacgaaatccccatccataccctccagaacaagttcaaaaccctagatctccaaggcaaagcccttaactggctctccaagtacccttgctgcttccaaat

SEQ ID NO: 24881 - DNA, 275 bp, Glycine max
  Clone ID: 701100195H1
tataaccatgaggagttctccagattaatggttcaggatgatttgaagtgtgcagcattttggggatctgatgggaagctctcaaaccacattgtcaacgggaattctgcatcagttctaaaatgaagctctcataatgtttggattaccgtttgcaggtggtgaatctatattgaaagtacgtagggagaagcatgcttttgttacttttgagttaataactttggaaggattggaacggtcatccaaacatacacttggttttagtggagatg

SEQ ID NO: 24882 - DNA, 266 bp, Glycine max
  Clone ID: 701100169H1
ctctcacaaacggaaactaaactacgttttttattttttccagacaataatacttcactatttgagtgtgatcgatggcatacccaaacccttatccggctcagccctatccctccgcctccgcgccgatgccggcggttccctccgccgtgatcggcccccagttctgcgcgccgtacccggtggatctggcggtggtgaagaaggtgatgaccatctctgacaacttcgttgtcaccgacgtcaacggcaacatcgtattcaaa

SEQ ID NO: 24883 - DNA, 265 bp, Glycine max
  Clone ID: 701100170H1
cggctcgaggaacaatggcagatgagggtgctatttctctatggagaggaaacactgctaatgttatccgttatttccccaaccaggtattgaactctgcatttaaggattacttcaagaggcttttcaactttaagaaggatagagatggctactggaaatggtttgctggcaacttggcctctggtggtgctgctggtgcatcatcccttttgtttgtttactctcttgactatgcccgtacccgtcttgccaatgatgcaaa

SEQ ID NO: 24884 - DNA, 251 bp, Glycine max
  Clone ID: 701100171H1
cactcgagccgaatcggctcgagctcgagccgcacgcaccaaccagagagtgtgatagagagaacacgactcttccttccttcaaacccttcaaccacgaccagcatgcaagactccggctccatgaagatctcccctctggatctcatgtccgccatcatcaagggtaagctcgacccctccaacgtctgctcctcctcctccaacgccgcagctgccgtcctgctcgagaaccggcagttcctcatggt

SEQ ID NO: 24885 - DNA, 267 bp, Glycine max
  Clone ID: 701100172H1
actcgagccgattcggctcgagcaattcaataccatttaccaaactcactcatcaattctcatacttcttctcactaactattacttcatcatgtcgagcacagctggccaagtcatcaaatgcaaagctgcggtttcatgggaggcagggaagccacttgtgattgaagaagtagaggttgcgccaccacaagctggtgaagtgcgtttgaagatcctctacacctctctttgccacactgatgtttacttctgggaagctaaggg

SEQ ID NO: 24886 - DNA, 269 bp, Glycine max
  Clone ID: 701100173H1
gctccatagctgcagcattagggtttttcatctgcttcaatggggaagggaacagggagttttggtaagagaaggaacaagactcacactctctgtgtgaggtgtggccgccgcagcttccatctccagaagagtcgttgcgccgcttgtgctttccccgccgcacgcactaggaaatataactggagcgtcaaggcaatccgcagaaagaccaccggaactggcaggatgaggtacttgcgtcacgtgcctcgccgattcaagagtgg

SEQ ID NO: 24887 - DNA, 265 bp, Glycine max
  Clone ID: 701100175H1
ctcgagccgttgaatcccattattttctgcgtcaattttgctgaaaaccttaagtgggtatcctgaaaacactagattttcgattcgtttggtaagcggatttttaggtttgattattacgtttttctgttcttgttggatatggaggtttcggtgattggaagctctcaagcgaatctgggagcgtcggaattggcatctagggaagttggattttgcaatcttaagaacaatttaagggctttgaatgatagagttagttttg

SEQ ID NO: 24888 - DNA, 269 bp, Glycine max
  Clone ID: 701100176H1
caaaaaacaaaatcacaaaccaaccttagcctagagacaattaagaagctagtttgcttgtttttcagtgaactcaaggcatacactttatctcttgagatacgtactaagattcatttaagaaattgatatattcccataattaatttgaaagaagatggaagtgctggtacaaagtcctagtagtccaaacatggatactttcgattttggtggcaacatgggttcgatctttcaaagtgttccttcttcaccaaaagggtttggta

SEQ ID NO: 24889 - DNA, 268 bp, Glycine max
  Clone ID: 701100177H1
agcagcttgaggatggccgtacccttgccgattacaacattcagaaagagtcgaccctccacctggtgctccgtcttcgtggtggcatgcaaatctttgtcaagaccctcactggaaagaccatcacccttgaggtggagagctctgacactattgacaatgtcaaagctaagattcaagactaagaaggtatcccaccagaccaacagatgctcatttttgctggaaaacagcttgatagatggccgaaccttgggagattacaaca

SEQ ID NO: 24890 - DNA, 270 bp, Glycine max
  Clone ID: 701100178H1
ggatatttcagtcgccgctgtgacttgcctcagatctaggtcacctctttcattttctttgctattcttgtcatcttcactgaccccatttttcccttatctccgttttctagatagagccaaggcatttaccttgtcaattatttggtgctggttagtttcttgaataatcttttgtctgtttttccatggatcgatcataacgaggaagaaatacaaggttttgggacctcttctcttggcttataaaaagtccaaaacaggagcctt

SEQ ID NO: 24891 - DNA, 273 bp, Glycine max
  Clone ID: 701100179H1
caaacaaataaagcaaaaggcctttttattccaaagcaaggcaggaagaaataaaccgaatgagagcattaacctcttcttcttccactttcattccaaagcgttattccttcttcttcttcctctccattctcttcgctcttcgatcctcgtccggcggctgctccgaataccaccaccaccaggggccgatggccacgttaggaggcttacgcgtctcccaaggctctcagaacagcgtccaaaccgaggccctcgctcggttcgccgtcg

SEQ ID NO: 24892 - DNA, 279 bp, Glycine max
  Clone ID: 701100180H1
gagaaagtagcagatcctccatggcctccaccaaggaacgtgaaaacttcgtctacgtcgccaagctcgccgaacaagccgaacgctatgaagaaatggtggaagcaatgaagaatgtggcgaagtaaacgtggaattgacggtagaggagcggaaccttctgtcggttgggtacaagaacgtggtgggtgctcgtagggcttcgtggaggattctttcctcgattgaacagaaagaagaagctaaagggaacgatgtgagcgtgaagaggataaagga

SEQ ID NO: 24893 - DNA, 273 bp, Glycine max
  Clone ID: 701100181H1
aaaagagctccctcgtgaagttgtgactgaaatcaaattgctccgactcccatttcagccagaatccacacctaatgcaatggaagtggagtccttgaatgaaaagagtataaggagaatccacaaggcattggactctgatgatgttgagctactgaagcttcttctaaatgagtctagtgtcactctagatgatgcacatgccctgcactatgcttgtgcctatagcgattctaaggttattcaagaagttcttagtctaggcatggctga

SEQ ID NO: 24894 - DNA, 266 bp, Glycine max
  Clone ID: 701100182H1
gcagaggctcacttatcgcaagcggcatagttatgctaccaaatccacccagcaccgggttgttaagacccctggagggaagttggtgtaccagaccactaagaagagagcaagtggacctaagtgccctgtcactggcaagaggatccaagggattccacacttgagacctgctgaatacaagaggtctagattgcctcggaaccgcaggaccgtaaaccgagcctacggaggtgttttatcaggaggagctgttagagaaagga

SEQ ID NO: 24895 - DNA, 172 bp, Glycine max
  Clone ID: 701100183H1
atgagcttcgttggtctctcgtccgtgttgtaatgatggatcgggtactagctagttctgcagttccactgtgttgtaatgtctggttttgtttgaagtgcttataagcatgattaatttgctgtgttctgcagtagatgaatgaaaaaaaaaaaaaaaaaaaacagaacaa

SEQ ID NO: 24896 - DNA, 263 bp, Glycine max
  Clone ID: 701100184H1
ctcgagccgcttcaacttcacccattcatacgtggtgttgttactgctgctcttttctcttttcttttctctttagttctcccttcccctttctttttctttttcttcttcttctgagcttgtttaagcttttcttccattaacatattatcacaatgtgtggtattcttgctgttcttggttgttctgatgactctcgagccaaaagggtccgcgtgcttgagctctctcgcagattgaagcaccgtggccctgactggagt

SEQ ID NO: 24897 - DNA, 261 bp, Glycine max
  Clone ID: 701100185H1
gtttgttaataaaaaagaagcagtggtttcttccaacgagttggaaaatggtttgtctttagatccaacccccgatgagattgctacaaatgaggaggaccatgaactggagaatgaagaatcagaaaatattttacctgacaatcaagaaagagacattattggatctgttgacccggatgcaccacctgatccagagaaaatcaggctggagcaagcagcatcaaaggcacaagctgctttcaggggttacttggcacg

SEQ ID NO: 24898 - DNA, 113 bp, Glycine max
  Clone ID: 701100186H1
agagaacccataacagctagttaatggccctcgctttcacttcttcaatttccgcaccaacttccaccaacccatcatcggaacccaaacttccgcaaattgggtcaattagg

SEQ ID NO: 24899 - DNA, 264 bp, Glycine max
  Clone ID: 701100187H1
aagcaagggagcaataatataagttggtgtttgcctgtattaaagaagcgtgacattcttacggctggtggtatacttggagctttggcagctgttgctgtagctttcagattttacagaagggcaagttgaaattcactttattctcaagatttagatctcaagggatctgatttagttggttgaaaatgatgtatgattattttaaattttctcgattcctgcgtattaaaaaaaattctcaagttttagattcatggggga

SEQ ID NO: 24900 - DNA, 264 bp, Glycine max
  Clone ID: 701100188H1
ctcgagccgcagcaactgcggttgcaacaagtactcttttgacttgacttacgttgagaagaacaccacagagactctagttttgggtgtcgggcctgtgaaggcccaattggagggtgctgaaatgggtgttgcatctgagaacggtggctgcaactgtggatcaagctgcacctgtgacccatgcaactgcaagtaaggtcaagatgtataaccttgaagcagagatagctgtaatatatgtatcaacagctactaagaagt

SEQ ID NO: 24901 - DNA, 268 bp, Glycine max
  Clone ID: 701100189H1
cattccttcatttttaaacctagctccatctccctccactcaccataacatgccatcagaagcaactgctgccaacaccaacttctgtgtaaatgttagcaacaatggctacattagtgctaatgaccccttgaactggggtgcggcggcggaggctatggctgggagccacctcgacgaggtcaagcgcatgctagaggagtaccggaggcccgtcgtcaagctcggtggagagaccctgaccatctcgcaggtcgcggcgatcgcg

SEQ ID NO: 24902 - DNA, 267 bp, Glycine max
  Clone ID: 701100191H1
cgcgtgtactttcttgcgaaacagaagggcgaaggggcacacacaacttttttgtttttttgtagagcgagagagaaaaaaatgttggggatcttcagcagttccgtggtgtcgccgccggaggagctggtggctgcccgcagcagaacgccgtcgccgaagacgacggcggggaagctgctgaaccggttcgtggagaacaaggcgtcggcggtgtcgctgcaggtgggagaacacgtgcagttggcttacacgcaccacaacgag

SEQ ID NO: 24903 - DNA, 266 bp, Glycine max
  Clone ID: 701100192H1
ctcatgccctcaggtgcagagagcctgaaggtgaagagttactcacttacatgcaactgtagtgcgaaatctgcccctacttaaaatttggttacatggctgccaatggagccattgcgcaagatgcagaaacgaggatcacatacacatcatagactacgaaattgctcagggaactcaatggatgactcttcttcaagcccttgctgcaagacctggtggtgctccccatgctcggatcacagggcttgatgatcctgtttcca

SEQ ID NO: 24904 - DNA, 258 bp, Glycine max
  Clone ID: 701100193H1
gatatatgaagttcacagaaccttcggggattattcagcatggggtttttttcttgtatttctctctctcgaatttgtcctagcatatgaccaaattaatgtttactagtgtgattggatctcccgttgaaaactcaaagctatgcttctgttgaattcactttcgccgaataataggagtattttgaatctttctatgcaaaatatccaaatgtacacgctctattaagtatgaaccctccttttccgttttcattt

SEQ ID NO: 24905 - DNA, 268 bp, Glycine max
  Clone ID: 701100194H1
gcaagcttaaagttatgtaaaaaaataagggggtgtgaggaaatggtgcacagcgcgtacgattgtctggaactggtgcgcgagtgcccagccaagatcgaatccatcgaatcctacggttcgaagcttctcgtgggctgctccgatggatcgctccgaatattcgcgccggaaacggaatcttcctccgacggctccaagtcctacgccttggagaagaacctcgccgggttcgcgaagaagcccgtgctctcaatgacggtggtgg

SEQ ID NO: 24906 - DNA, 263 bp, Glycine max
  Clone ID: 701100168H1
gggcaatcatcaatccagcgatttcgaagcagatgaaagaaggactagaacaaaaaacgttggtattattattattattcaatccttcaatatccatatgcataccaacaagacacgctttttcgttcaatctccatagcgggggatgtagcatgccataaaagcaggtgctctggttccttgtcatccggaaagaaatactgtagatctgggttagcaatggctcctggaagcagtgttttcaaagtagttcttgactctca

SEQ ID NO: 24907 - DNA, 253 bp, Glycine max
  Clone ID: 701100130H1
cgataacgtgaaagctaagattcaagacaaggaagggatcccacctgaccagcagagacttatctttgcgggtaaacagcttgaggatggtcgaacccttgccgactacaacatccaaaaggaatccactctccacctcgtgcttcgcctcaggggtggcatgcaaatctttgtcaagcactttgactggcaagaccatcacctcgaggtcgaatctccgacaaccattgatatgtcaggcccagatcaggac

SEQ ID NO: 24908 - DNA, 279 bp, Glycine max
  Clone ID: 701100133H1
gtttttaaactgcgcaatatttggctaccagacagagttatctcacacactgcctaaatcagcaacaagagcagcaatgcttgtgagggttaatacccttcttcaaggctactcaggaatcagatttgaaatcctagaagctatcacgaaactactgaaccacaatgtcacccccatcttgccattacgtggtacagttactgcgtctggtgatctaattcctctgtcctacattgttgcattgctaactggtaggcgaaatagtaaagctgttggacc

SEQ ID NO: 24909 - DNA, 274 bp, Glycine max
  Clone ID: 701100134H1
actcgagccgattcggctcgaggaactgctagcatgggctaccaaacttctgtaaatatgtaccctagattactgattttcacttatacagattaccaccaaagtaatcaatgtcttatgttaacttttctgcccatttcacttgcctgtatagaatggtacacgaggaagacaaaaataggtctgaggaaaatatttctcttatttcctgaattcctgttctatatgtaccgtctttctacatcttttgctctttattgtttgatgcaactta

SEQ ID NO: 24910 - DNA, 254 bp, Glycine max
  Clone ID: 701100136H1
gcaaagccctgggttcatggttcagcttcttcatcctaaggaaaataattggcgtttggctgaatcatggaatagattggatcaagataaacaagatgacaagccagttgcttctgatgggatgataataaagtataaaccacctgtaggtgaaaaactaaagcccgtagttcctctatctcctggtttcgaaaatcaaccagaacctgagctttctgctgatgggctgaaagacttgtgcatcagttctgaat

SEQ ID NO: 24911 - DNA, 265 bp, Glycine max
  Clone ID: 701100137H1
caccaaacgccccaagcacgacaacaacggctcttccttcgactccatcgatgtgaattcgtattcggtaccgtcgatttcgccgtcagcggtgtcgtactcgcaccaggtcggcggtgcgagcaagaagattgatatccccaatgggagggttggtgttatcattggaaaaggtggtgacaccatcaagtaccttcagctgcagtctggtgccaaaattcaagttactcgtgatatggatgctgatccgaattcggctactagg

SEQ ID NO: 24912 - DNA, 265 bp, Glycine max
  Clone ID: 701100139H1
ctttattcacaatgagaagcccatagcagagtctcttgtgattgttgaatacattgatgagacatggaagaacaaccccatcttgccttctgatccttaccaaagagccttggctcgtttctggtccaaattcattgatgataaggtttttggtgctgcatggaaatccgttttcacagctgatgagaaagagcgtgagaagaatgttgaggaagcaattgaggctctgcagtttcttgagaatgagataaaggacaagaagttc

SEQ ID NO: 24913 - DNA, 266 bp, Glycine max
  Clone ID: 701100140H1
aaatcgcactctgcttttcagaaagcacagagatgcgttgaagagtgttcgggttccctccatctcctcgccgccattcaccgcttccggcgccggcggtggccccgtcatcgaattggccaccacctcgtttctcaatcccaatcgctcttacgcaccgctaagtaccgaggatcccggcaattccagtaggggtccaaatgcaattacagtggggctacctccggcgtgggtggatttatcagaagaaatatcagcaaatgtgc

SEQ ID NO: 24914 - DNA, 271 bp, Glycine max
  Clone ID: 701100141H1
aaaagacttccttttttgcaattgtcatttgtcaccaaacaattgttgttagctctcacaagcaagcttcagcaacgacaatgaaggtcagaactagatgaagaaaccaatctcttttataattacctccctttcatccactaatcaatgtttctaattgagtttaattttctcagggatagccttacactggtttgtgtccactagatcttgtatttaactatttcctttcatgtgttaaatgtagaagtacattaactattgggtctta

SEQ ID NO: 24915 - DNA, 271 bp, Glycine max
  Clone ID: 701100143H1
ctcctatactctatttttcgcgtcacataaacaaaaaaaataaactggggagaagcatgttgttgatgttgggactatgcttcctattgttctctgcatttccacttgcgttctctgacagatgccacccacaagacaagaaagcgttgctccaactccagaaggacctcggcaacccttatcacatcatatcctggaacgcaaaggaggattgctgcgagtggttctgctgcgttaagtgtgacgagaaaacaaaccgcgtcattagcgt

SEQ ID NO: 24916 - DNA, 271 bp, Glycine max
  Clone ID: 701100145H1
cttgtttgttgttgttgttggaagccaaaaccctagcagccggcccgaatggcagacgttgaggttgatgtggcggcggcggcggcggcggcggctgcagggcagccaaagaagagaacgttcaagaagttcagcttcaggggggtggatctggacgcgcttctggacatgtccactgacgaactcgtgaagatgttcagtgctcgcgcacgcagaaggttccagagaggtctcaccagaaagcccatggccttgattaaaaagctccgca

SEQ ID NO: 24917 - DNA, 251 bp, Glycine max
  Clone ID: 701100146H1
ggcgagtttgggtgaaggagcgttccggagcgtggtgggaggagtgtaacaaacccgaatttccggaagaagggttcaaaaaggcgttcagaatgggaaggctcacttttgaagcgatatgccaggagcgcaattctgtgatagcgaaggaagacacgacgctgagaaccgccattccggtgaaacaaagggtggcggtttgtctgtggcggtttgccaccggggaccctctgagcgtggtttccagaaga

SEQ ID NO: 24918 - DNA, 279 bp, Glycine max
  Clone ID: 701100148H1
aatttatcgagtctctatcggctagtgagattgaactctctgaggattacacctgtgtgatttcccatggttctaatccaaaaacaacccatattttctgtgactgcattttggaaagtcatgttaatgattctgaaagacattataaggctgaagaggagggaacgggattgccccttttcagtgttaacattttgcatactccaagccaatatccttctcatgacttcttaagtgtctgtcaccattgcaacaagaagttggaagatgggaaagata

SEQ ID NO: 24919 - DNA, 270 bp, Glycine max
  Clone ID: 701100149H1
tattttgcagcaagagaaaaagaatgtgccggaaatcacccaacctgtggttggcagaatgaaggagaggttatggtcaaagcaagcaaggtcgaagaagaaaaaggaggaacaatatataactgcagaggagttgttggccagcaagcaacaacaagagttggaggttgttcagaaggtttatgatatgaggggtgcacaggttgaggtattaacaaattggccggatttaaatgccgaggagaaagcaaaagaaaatgatgtcccgat

SEQ ID NO: 24920 - DNA, 75 bp, Glycine max
  Clone ID: 701100150H1
ccacaataaacccctttctctcaattttcattcaacaccatggaaagacacaccaagtccattttcttcaccttc

SEQ ID NO: 24921 - DNA, 254 bp, Glycine max
  Clone ID: 701100151H1
cgaggctttagataagcatgaccggataaaggctgtagaaatattagtgaaggatttgaaagtgtttgccacatttaatgaagaattgttcaaggaaatcacacagcttcttacattggaaaatttcagggaaaatgagcaattgtctaagtatggtgatacaaaatctgcacgagcaatcatgttggttgagctcaaaaagctaattgaagcgaatcccttatttcgtgacaaactgcaatttcccaacctta

SEQ ID NO: 24922 - DNA, 119 bp, Glycine max
  Clone ID: 701100153H1
atccagtaatcatgtctagtggagatggtaaacaaagtaacgatgatgattcaggtgttttctcatcagaataccgtcgcaagataattatagtatcaaattctcttcctctcaatgca

SEQ ID NO: 24923 - DNA, 261 bp, Glycine max
  Clone ID: 701100154H1
atgagatctgctggttgggatattgatgcatcagtcaaggccattatggagcagaatgtggtttactggaaagaagatcacaagtgttttgcaattgagtcctttgtgtgtagggagatgtttgattcattcaacttccccaacttctccctaccaaatgagtccctaccagataggaacaggaggcaactgttctttgggaggttcaacgagctaaaaccagagaaagcaaaggactttcttgcagggaaaccaagatca

SEQ ID NO: 24924 - DNA, 264 bp, Glycine max
  Clone ID: 701100156H1
atcaactcttctctttctctttctcttctcttctgtcgaagaagaagaagcagaagtagttacagaaacatgctggagaatcttcaggctcctccgccaacggaatcggccccagtggtgaagcgctatgctcctcccaaccagaggcaccgttctgccaacaggcgcaaatcatctgatcggcttgatcggacaaacagtatcgggaatgacttagaaaagaatcaagttgcttattcaagaagtgttcacattccagatcac

SEQ ID NO: 24925 - DNA, 172 bp, Glycine max
  Clone ID: 701100157H1
ctgctgttggagccctttggggttgtggccatgatgccggtcaagctatctttggcttaatatttttgctcttaaaagatcgacttcacattgaaattatccaaacttggggcacccgtgtggttggccttaccctgctagtaattggtgctatgggaattaaggaaccttc

SEQ ID NO: 24926 - DNA, 268 bp, Glycine max
  Clone ID: 701100160H1
gaggcagaccactatcagtaggaaagaccatagggaggaggggaatgaggctgatggattttatggtggaataagaaagattaagagtgaggcggagattaccacttggaaacacctttggccattggaagtcttggaatagtaagcactggcactggatcggatcaaattctctacaacttagcatgatttcaatatagaagctttgtttcagcaactgaagcattgactggttctgcattatacaacctgaagtggactttcagat

SEQ ID NO: 24927 - DNA, 66 bp, Glycine max
  Clone ID: 701100161H1
tcgaagctcagctcagctccagcttggagggtccatggtccactttctggatctcagcgtcagcca

SEQ ID NO: 24928 - DNA, 274 bp, Glycine max
  Clone ID: 701100162H1
ctcgccgcgagtcgcttcaacgagatccgtcagattttccgtcagccttctagggctttctcaaccgacctgaactaccaccttgacacaccggacaacaaccctaaacttccatgggaattcaccgaggccaatcaagcaaaggttaaggagattttgtctcactatccatccaactataagcaatctgctacaattcctcttttagatcttgcccagcagcagcatggaggttggctacctgtttctgcaatggatgcggtagctaagattg

SEQ ID NO: 24929 - DNA, 278 bp, Glycine max
  Clone ID: 701100163H1
actagctattagctatagctagacgtccctccaatccctctttgtctttgtgcttttctagttccttccaaaataccaacaaaagcaaagacaatgagttgccaagcatggcccgaacccatagttcgagtccaatccttagctgaaagtggcctaagttcaatcccttcacgctacattaggcctcactcccaaagaccctccaataccacttcttttccaactcctaaaccttttcaaactgatcatcatcatggtcatgatcagaaaacttccga

SEQ ID NO: 24930 - DNA, 191 bp, Glycine max
  Clone ID: 701100166H1
gtttggagcgatccgagaaaaactctgtaaacatgttggttcaccaggacctccttacaggtgatgagcatctctctgactccttccgttacaaggaaattgagaatggaatgctgtgggaagttgagggcaagtgggttgttaaaggagcagttgatgtagacattggtgcaaacccttctgctgagggt

SEQ ID NO: 24931 - DNA, 266 bp, Glycine max
  Clone ID: 701100167H1
ctcgagccgcggcggatcgcgaggaactgtgaggcggtggtggtggcggtggggtaccggcacggcgccagagaatcggtacccggcggcgttcgaggacgggatgaaggtgctgaattggctggcgaacaggcgaatttggcggagtgtagtaagttgatggggggtaggaggttggagggccagcacaagcatattgtgggttcctttggggcatcaatggttgagccttggttggctgctcatggaaatccttcaaggtgtgt

SEQ ID NO: 24932 - DNA, 270 bp, Glycine max
  Clone ID: 701100129H1
gagaaagtagcagatcctccatggcctccaccaaggaacgtgaaaacttcgtctacgtcgccaagctcgccgaacaagccgaaacctatgaagaaatggtggaagcaatgaagaatgtggcgaactaaacgtggaattgacggtagaggagcggaaccttctgtcggttgggtacaagaacgtggtgggtgctcgtagggcttcgtggaggattctttcctcgattgcacagaaagaagaagctaaagggaacgatgtgagcgtgaagag

SEQ ID NO: 24933 - DNA, 258 bp, Glycine max
  Clone ID: 701100084H2
tttcacttaggggaagaagagaggatcaagcttcgtagaggaagggttttttcccttcagaatgaacctgatgtggctcgagtttggctgcctaactctgatttccctggtcttgctatggctcgggcatttggagatttttgccttaaggcactttggattgattgctgttccagatatctcatatcaccgccttaccgagaaggatgaatttgctgtgttagcaacagatgggatttgggatgttctgtcaaatga

SEQ ID NO: 24934 - DNA, 252 bp, Glycine max
  Clone ID: 701100085H2
cgcctccattatcagtcctttttcaggcgtggtttttacctaaccctacaattcgccgatccttccagttggggtttttcgctttcagcgaagagcggtgtatatagaaaccctattccccctatgcaccaggggaattgaatatagaaataagaaaaaggcaaaaaaaaaagaggttgaaaaagttgtatgttaaataggtaattctgttgtttcacgtgtttctggactcaggagctgagctgtttccag

SEQ ID NO: 24935 - DNA, 135 bp, Glycine max
  Clone ID: 701100087H2
ataggattgaaaatcttgcaaatctctcattttgtgtggtagatcttacggcatcaaatccctggttgctttcgcagatcgctcccttttgcaactccaactcccttctcttgatgtccaccatcagaataggtg

SEQ ID NO: 24936 - DNA, 250 bp, Glycine max
  Clone ID: 701100089H2
tgaaaagcaacaactaccaccaccgagtggggtccgcaaaattgaatgttccgaaatggaggacgagaagccggagattctgccgccagatccgccgtatacggcggcgacggtggcggattgcctgtacttcgaggcttccgactcggtgccccggctgcacacgacggactcgagctgctccgagcaggtggtgtcggcggagtttgcgagcgaggtgcagagcgagccgaagacaggcagcaacaac

SEQ ID NO: 24937 - DNA, 255 bp, Glycine max
  Clone ID: 701100090H2
cttgtctctccaccatgcaccaagccatttcccacagaagcttacatccccataggagcacgtggcatgccacacgcaggaggaatcaaagaatccaatggcacctatccatccaaagctgccacaatggtatcggagaacgcggtggtaatcattggaaaacggggatgctgcatgtgccacgtggtaaaaaggttgttacaaggtctgggagtgaaccctcccgtgtacgaggtggacgaggaccacgaagcc

SEQ ID NO: 24938 - DNA, 247 bp, Glycine max
  Clone ID: 701100091H2
ctgagaagtgcgacgctgctgcaaagtgcaagcggatttcgtactcttctttactcccaatcatttctctgtgcaaggataagtgtgttatctatctaaaaacacaagatgtcagctgggcctggacttgaatctctagtagatcagacaatttcagtcattacaaatgatggacgaaatatagtgggagtcctgaaaggttttgaccaggcaacaaatattattcttgatgagtccatgaacgggt

SEQ ID NO: 24939 - DNA, 254 bp, Glycine max
  Clone ID: 701100092H2
ccagcttatagaggtcgttgacggcaaagagagacacaaatgtattctgtttgagtttgaaacattgattcgttgtttcctctgcaaaattaaatcctcattgtgattgttgatgaacaattgaagtgtctctccgatttgaggattccggcgacagcaagcgatgaccaccggcggcgacggtgacacctccaaacaagagctgcttccaccttatcaaacgcttcggagcttgcgtcactttcaagatctcc

SEQ ID NO: 24940 - DNA, 254 bp, Glycine max
  Clone ID: 701100093H2
caattcctcatgaattatgatcatttttttccatctcttcattctacctatagtgcttcctcacctttacccctactagccacccgtttataaatctacatgctagggttagggttattcaccaactattcgttaattgtatagacatagctagtgtgcgctattttatttactatatatctccacaaagctacctatctatctttcccgttttctgggtatgttttcggtgaaatgaagaactgaaaaaggat

SEQ ID NO: 24941 - DNA, 255 bp, Glycine max
  Clone ID: 701100094H2
cacgaatatcttgttgtttggagcgatccgagaaaaactctgtaaacatgttggtttaccaggacctccttacaggtgatgagcttctctctgactccttccgttacaaggaaattgagaatggaatgctgtgggaagttgaggggaagtgggttgttaaaggagcagttgatgtagacattggtgcaaacccttctgctgagggtggaggagaagatgagggagttgatgatgcagctgttaaggttgttgaca

SEQ ID NO: 24942 - DNA, 255 bp, Glycine max
  Clone ID: 701100095H2
tccagagccagcattacgccggggtgattctgtttatcttgtggggttgagtagaagcctacaagcaacttctagaaaatcagttgttaccaatccttgtgctgcattaaatataggatctgctgattcccctcgctatagagcaaccaatatggacagtaattgagcttgatacagattttggcagtacattttcgggtgtgctaacagacgaacaaggaagggtccaagctatatggggaagcttctcaactc

SEQ ID NO: 24943 - DNA, 85 bp, Glycine max
  Clone ID: 701100101H1
gtggcattatcaggatccaactgggaaggttcaaggacctttctcttgattggagctgtaaaagtggaaggcttgtggatatttg

SEQ ID NO: 24944 - DNA, 73 bp, Glycine max
  Clone ID: 701100104H1
gattttagttatctgatgttgttggtgggtatggctttgactggtttctaatcaatgtttccttttctcccac

SEQ ID NO: 24945 - DNA, 269 bp, Glycine max
  Clone ID: 701100105H1
cttgaactcgaatattcactatggcagatgaggtggttctgctagatttctggccaagtccatttgggatgagggtcaggattgcacctgctgaaaagggtatcaaatatgagtccaaagaagaggacttgcagaacaagagccctttgctcctcaaaatgaacccggttcacaagaaaatcccggttctcatccacaatggcaaacccatttgggaatctctcgttgctgttcagtacattgaggaggtctggaatgacagacatccc

SEQ ID NO: 24946 - DNA, 265 bp, Glycine max
  Clone ID: 701100107H1
aattattattatcaccaatcccaacagaaaccgcgagaaaattccccagaaatctcaacacaggagaacaagaaaaaccaaacacagtttatcaatcaaatctttttggaacatagcacaacaattttcagctctgtacaacgttggatttggttcagttatcgtgtgaggaatattagagcatagaaacatggtggctgaagcagaggttgtgtgtcaacaaaacgtgggtgtgttggatgtgaagcattttccaaataaggta

SEQ ID NO: 24947 - DNA, 103 bp, Glycine max
  Clone ID: 701100108H1
ctaagatacgtgtacacatagcaacagaacttggaagagttttgacctaattaaactgcgtgaagaataagactagactagatagaatattgtacttctgatg

SEQ ID NO: 24948 - DNA, 269 bp, Glycine max
  Clone ID: 701100109H1
cacaaatttacattaagcatagtacaaaacaatgaagaccaaactgctagcatttctcctcttctttgccttgactacaaaaccactactacttggagcagctggagctgctccagagccagtgattgatacatcaggcaagaagctgagagctgatgcaaattaccatatcatccctgcagtgcccttcaccatatgtggctttgttggctgtttcactggtggaggcctttcactagacagcatagatgaatcttgccctcttgata

SEQ ID NO: 24949 - DNA, 274 bp, Glycine max
  Clone ID: 701100110H1
cgagttcgtgttcttctccggtggatttctggaaccatgccttgtgggaaggtccacgcctgtgagctttgctaatcctaagaggccactctatggacatctctcgagcatagattccactggaacatcaatgcgattgacatgggttagtggagacaaggagcctcagcaaatccaatatggaaatggaaaaacagttgcttcagcagtcactacattttcacaagatgatatgtgtagttcagcgctgcctagtcctgctaaggatttcgga

SEQ ID NO: 24950 - DNA, 271 bp, Glycine max
  Clone ID: 701100111H1
gaataacagcacctctttctctctgtctctctcccctcgttgatcccaaatctactagggattctcattcgatgcgattcggccggaagctttcgttttgcggatttttttaattattatttttcctggctatcaggaaagttgaaaaaaagctggaccatgacaagactggatgccaagctcccccagaaggtcctatattgtgcatcaacaacttatcactttttggaagtgcagctaccttgagcatgtgttctaagtgccacaaaga

SEQ ID NO: 24951 - DNA, 274 bp, Glycine max
  Clone ID: 701100112H1
aaacacaacaacactctctcttctcgctcttggcttttcgctcttcactcactctcattcattcatttccaccgttcatggatcccgtaagcgtgtggggtaacacgcccttggcgacggtggatcccgagatccatgacctcatcgagaaggagaagcgccgtcaatgccgcggaatcgagctcatcgcctccgagaacttcacctccttcgccgtcatcgaggccctcggcagcgctctcacgaacaaatactccgagggcatgccgggcaa

SEQ ID NO: 24952 - DNA, 280 bp, Glycine max
  Clone ID: 701100115H1
aaagtctataaaagggaaaaaaaataaataataaacagcgaagttacgaagattctgtagagcagaagagcaatggcgtccaacgattccgattcgcagatgaagatcgtacatggcgatgctggttacatacttgaagacgttcctcacttcgccgactactttccaaatcttcctacatatccgaatccccttcgatccaatcctgcttactcggttgttaagcagtatttcgtgcacatggacgacactgttcctcagaaggttgttgttcacaagg

SEQ ID NO: 24953 - DNA, 225 bp, Glycine max
  Clone ID: 701100117H1
attcggttcgatctttctgattgccttcaaatcacacactctcttcaatttctagggttttgctattgctttgcctccgttccccctttctcacaaaaacaacgccttttctcttctccttcgtatctattctttgcgtttggtttttggttgattgaaggcattcacagcgtaattcgttgctgcattttaatcgatttatctaaccaggactgaatgacctaa

SEQ ID NO: 24954 - DNA, 270 bp, Glycine max
  Clone ID: 701100120H1
agcagaagttggacaacatttccaatgatatgttatttaggatatacattcacatttaataagaaatgttacagttaaatcacaaacgtggaagatgttttcagtgacactgtgttaggtacatagaatatgtgcacttgtcctaaagctaggttgttttctatgtgcgagtacagtgttgaatcagtatatctagagatgaattcccattttttatgtatatttatcttatccggtgagcgagcgactatttccaagaaccggttgatg

SEQ ID NO: 24955 - DNA, 182 bp, Glycine max
  Clone ID: 701100124H1
gttgcggaagtcctgcaagtgcggcaacggctgcggatgctgcaagatgtacccagacttgagctacactgagtcaaccaccaccgagaccttggtcatgggagtggcacctgttaaggctcaatttgagggtgctgaaatgggtgtgcccgctgagaacgatggctgcaaatgtggaccaa

SEQ ID NO: 24956 - DNA, 273 bp, Glycine max
  Clone ID: 701100126H1
ttcagcttcagagccatactttctcttccctctatgtccattcagcttctcacttcaaccaaaaataaaaacggcaactttgatccaaacctcaccttccctttcttaattgaagaaccttttaaatcccttcttctttaacactaccctttactcttcttaaatctctatcttgataataacattcacccatttcctcacttgtttcatttcttcacattggaggcttagggttctactcattttgatgcttgagttctgtggtttctaagg

SEQ ID NO: 24957 - DNA, 259 bp, Glycine max
  Clone ID: 701100083H2
gctactggaaatggtttgctggcaacttggcctctggtggtgctgctggtgcatcatcccttttgtttgtttactctcttgactatgcccgtacccgtcttgccaatgatgcaaaggctgcaaaaaagggtggagagagacaattcaatggtctcgttgatgtctacaggaagacattggcatctgatggtgttgccgggctctaccgtggtttcaacatctcatgtgttggaatcatcgtgtatcgtggtctgtactt

SEQ ID NO: 24958 - DNA, 271 bp, Glycine max
  Clone ID: 701100128H1
ctcatctcctccaaacccaccttccgctcctcccctacccttatctccgccactcgccgcctcctcgcctccgctctcctcgacgacccttccaacgcctacttcgccctcctctcccagcactgcatccctctccactccttcaaatacacctacaactccctcttcctctccccaaccttcgattccgtaaaccccgaatcctcgttccgcttcggcctccgcctcatatacaaatccctcgtcgagatcctctcccacgcgcccaagc

SEQ ID NO: 24959 - DNA, 261 bp, Glycine max
  Clone ID: 701100045H2
cgcaatggcccaaatgacactgttttcttattctcaaccccaaagtagcaataaatagatgtctccaatttttctgctcttgatcaaaagtcgtagaactagaaggttaggttgagggcgatatgaaggtaaccaaagggaaggaaactaaaattgttctgacaaaacccttccaattggaaggtgaatcagatttagaaccgtcttatagagctcccaatctcctacatcgcttgttaagtttactcaagaacgtgcggc

SEQ ID NO: 24960 - DNA, 251 bp, Glycine max
  Clone ID: 701100046H2
attttgcaaaccaggcgctacttgcttatggtttatctagctcgaggcgtgcaccagatgctattcatccctatggctattccaaggaaagatttgtctcgtccttgatatctggtgttgggatcttttgtcttggttctggtgccaccgttgttaatggagtacagaacttgtggattgcacagccccctgagaatatgcagtatgcagctttggtgatatgcggttcattcatcattgaaggtgcttct

SEQ ID NO: 24961 - DNA, 257 bp, Glycine max
  Clone ID: 701100048H2
ctctctcttcctctttagcttcatcgccatggcatcaccagcaagaaccttctttgccttcattctcgccgtcgtcgctctcttcttcgccgccgccaatgctcaagacctctccccggctccgagtcccgatgccggagcggcgggatccgtttcgagctccgtcgccatgatcggagcttcggttgtgctgtcattgatggctatcttgaagcattgaaatccgttaatttcgttgggtttgtacaaaattgatt

SEQ ID NO: 24962 - DNA, 266 bp, Glycine max
  Clone ID: 701100050H2
ctgagatcgacctcgcatcatgtttatggaatggctgctatcttatctcggaaatcactccttgctcttcgttcgcgccaattgtgaagaaaatttgtcttacataaatgccttctgtagatctgcatacccattcaattgatcaactgggttactaatcaaaattgcatagacagaaagatcagcagaccaaatgtttccactcccatatctcttccaagatttccatggattcctaaacgacttgcaggattgggaattttcta

SEQ ID NO: 24963 - DNA, 264 bp, Glycine max
  Clone ID: 701100051H2
ttgtgctgccggtaacttgaaccaagactttcagcttacgtggggagatggtcgtgctaaaatactcaacaacgaaaatcttctcactctctcccttgacaaggcctctggctctggcttccaatccaaaaacgaatacttatatggcaagattgacatgcagctcaagctcgttcctggaaactctgctggcactgtcaccgcctattatctgtcttcaaaaggatcaacatgggatgagattgacttcgagttcttggggaa

SEQ ID NO: 24964 - DNA, 262 bp, Glycine max
  Clone ID: 701100052H2
cccgagcgaatcggctcaggattgcttccctccttccctacttcatctatgcttcactccaaatgcgtttcttcacctatgtctcacttaatgattcagtggatgagaaacgacaggcaaacaagtgatccagaatactgtaatgtggtaaggcagcgatcgattagacacacaacagttggattcacagctcgtttggaagcatccaaacgttttgaagcatccagaagagttgaagcattcaatccttttgaagcttcca

SEQ ID NO: 24965 - DNA, 82 bp, Glycine max
  Clone ID: 701100053H2
cgtaatctgagtgtttgaagcaaatccatcgacatggcagcatcgtcttcttctgcttcagaggagccacaactcaaggacg

SEQ ID NO: 24966 - DNA, 256 bp, Glycine max
  Clone ID: 701100055H2
cttcatttgcatttccatttttcacactctctctgcttccaccatgtggacacttcgtcgagcttctcttcgtctcagtacgagccaaggacttaacgcgggagctacccgtgcttcggctgtcaaattagtgccaatcactgttgaagaaaatgaggctggtatccctcagtctcgtcaaatcactcacagtagatttctgtccgctgacacattttgccgcacgggtcgggtgtccctgaaatttgctgtgggc

SEQ ID NO: 24967 - DNA, 259 bp, Glycine max
  Clone ID: 701100056H2
gatatttctatagttaaagagctgcctaaagagttcagctggagcacaagagagtactatggcttggctattcgagaaacccgaatcaaggctgcgcctgtgcatgcatcagcccattggtatctggagaatgttttgcctgttctacagagttatggtattgctgcaatctctccattttctcacagactgagttttgacaacttgcctatggatattcaacacctacgctgtaaagtcaacttccaagctttaacct

SEQ ID NO: 24968 - DNA, 258 bp, Glycine max
  Clone ID: 701100057H2
gtgctctgctcgtgcctctagggttatcatatctccatttccatttcctctctctcagtttccaagactcttaagctatgggaaagtcttacccaaccgtgagcgctgattaccagaaggccgttgagaaggcgaagaagaagctcagaggcttcatcgctgagaagagatgcgctcctctaatgctccgtttggcatggcactctgctggaacttacgacgtgagctcgaagaccggtggtcccttcggaaccataa

SEQ ID NO: 24969 - DNA, 258 bp, Glycine max
  Clone ID: 701100059H2
gtgatttggagtttggagcgactgaactaatcattaatttgcactcgctgtttcagcttcatcacccttcttttgcatcatttatatctcttgagaaatggcacaagaaacctttctattcacatctgaatctgtaaacgacggtcaccccgacaagctgtgcgaccagatctctgatgcagtacttgatgcgtgccttgatcaggaccctgatcactaggtagcctgtgagacatgcaccaagaccaacatggtcat

SEQ ID NO: 24970 - DNA, 258 bp, Glycine max
  Clone ID: 701100060H2
aatccctctttcttcctcttcctcagtagtgcgattttcgattctcttctctgcaactatgcctaaccctaaggtcttcttcgacatgaccatcggcggtcaacctgccggccgcatcgtgatggagctctacgccgacgtgactccgagcaccgccgagaacttccgcgcgctctgcaccggcgagaagggcgccgggcggagcggcaagcccctccactacaaaggctcgtccttccaccgcgtgatcccgaactt

SEQ ID NO: 24971 - DNA, 139 bp, Glycine max
  Clone ID: 701100061H2
atacggtccaaaaccaaatattgaacgactcgtcgtaaagaagcacacctttccctttcccttcatttcatcgtattcgtgttcgcagtgtctaaactaacccaatgctctctcgctctctcacagctcgtcacatact

SEQ ID NO: 24972 - DNA, 139 bp, Glycine max
  Clone ID: 701100064H2
cagaagatgaagaattgggttcaggctgttaaggttgttgttggagtccttctcagtggtgagaagaggctctgtgatggtttgtttggcgatttggatgatttgaaggagatttgtttcaatgagacttctaagggct

SEQ ID NO: 24973 - DNA, 138 bp, Glycine max
  Clone ID: 701100065H2
aaacacaaagacattcattcttgtaccaatgcgaacagaagaagcacccatccacggcgatatcttagaggccatattctcgcacgtgccactcatccaccttgtgcccgcctctcacgtgtcgaattcctggaagcg

SEQ ID NO: 24974 - DNA, 265 bp, Glycine max
  Clone ID: 701100066H2
aaacgacattcattcatctatggctacccttattgctcccaccagtcactctccccaagaagacgctgaggctctcagaaaggcttttgaaggatgggggactgatgataaaactgtcatagtaatattgggtcatagaactgtttatcagaggcagcagatcagaagagtctatgaggaaattttccaggaggatcttgtgaaacgcctagagtctgagatcaaaggagactttgagaaagccgtgtaccgatggatactagaa

SEQ ID NO: 24975 - DNA, 264 bp, Glycine max
  Clone ID: 701100067H2
cacactttctctctctttccttcaaatctcaattctattttgcaaaatctgaatcaaacacagttaaagacgcacaagaaaacatctcgctcaacaccaccaacacttcggatctacgtttccactctccgaacatcaaaaaaggaaagaaaaaccgatttacagcgacaacaacgaacgaacgatttctcgaagcgctctcaaaatggcgcgtgcaccctttacttcattccccttcgtcctcattacccttctctcaattct

SEQ ID NO: 24976 - DNA, 260 bp, Glycine max
  Clone ID: 701100069H2
attggctttcctcttctacaattctaaaatcacgcaaatggcatccaagagaatactgaaggagctcaaggacttacagagagatccaccaacttcatgcagtgcaggacctgtgggtgaggacatgttccattggcaagcaaccatcattggtccaaatgacagtccctatgctggtggtgttttccttgtgaccatccatttccctccccgttatcccttcaaacctcccaaggttgcattcaggaccaaggttttcc

SEQ ID NO: 24977 - DNA, 256 bp, Glycine max
  Clone ID: 701100071H2
cagaatggcagcacttggtggcaatcgtgatgtggcaggaagccagaacagccttgagatcgatggtttagctcgctttgctgttgaagaacacaacaaaaaacagaatgcccttttggagtttgaaaaggtagtaagtgcaaaacagcaagtggtttctggtaccttgtacaccatcactttggaggcaaaagatggtgggcaaaagaaggtttatgaagccaaagtttgggagaaggcatggttgaacttcaag

SEQ ID NO: 24978 - DNA, 257 bp, Glycine max
  Clone ID: 701100073H2
cacgagtttctctatctgctttcttcacaaagagtaacctcatcttctaaaaactttctcaaaaccattattattctctaatacttcgtttcttcaattaattaattggtttcttgctatggctgtggactctgcgatttcgtccccattgggtcccccggcctgtgagaaggacgcaaaggcgttgccgttcatcgaagaaatgactcgcaacgccgacgccgtccaggagagagtcctggaggagattctcacac

SEQ ID NO: 24979 - DNA, 255 bp, Glycine max
  Clone ID: 701100076H2
gttctgggggtggcgtcgccggcgattcccccctccggttccctctccacccttcaattcaaccctctcgtcttcgcttcactgattccctctttcaaaatgcttccgatcgcttgctagggttttccctctcccaaatctcctcctcggaaagcaccctgtaccttttattcctccgactaatcaacttctttgctatggctattcgtgtaacttttccttttcgggctatgtcgcccagagcctcgcctcctc

SEQ ID NO: 24980 - DNA, 252 bp, Glycine max
  Clone ID: 701100077H2
ctgagccttttgctcaaggagcttttgggaaactctacagaggtacttacaatggtgacgatgtgctattagaatcttggagaggcctgaaaatgatccagcaaaggctcaattgatggagcaacagttccagcaggaggtcatgatgttggccacactaaagcatcctaacatagttcgtttcattggtgcgtgccgcaagccagtggtatggtgcattgtaactgagtatgccataggtggttcggttcg

SEQ ID NO: 24981 - DNA, 245 bp, Glycine max
  Clone ID: 701100080H2
gtgaacttctttaagcatgcctctgcactggaagagttttgtggaggcacctacaatgaagaaccagaaaaatactctgctatatcattaccagcaaagttatgtcgattgggtttaacatatcttggaaagaatgagttgcccatagtgttcatgtttgcagccgtactaaaaaaattggatctctctatgcaatgctagacacggaggatcattgcatgttaatccaaaagtgtccaatctgg

SEQ ID NO: 24982 - DNA, 268 bp, Glycine max
  Clone ID: 701100081H2
aaatacttctcttggcattttgtgtcccttctctctttctcttgctcgatattttccaaccaaaatagattattaaaaccaaacgtagctaggcaccactgctaggaatggcaagtgagatatttcttgcccttctgatcacaacctttgtggttgcagcctctgctggtcaacttcaaccaagactttgagataacatggggtgatggtcgtgccaaaatcctcaatagtggggaacttctcaccttgtccctagacaagacctctg

SEQ ID NO: 24983 - DNA, 261 bp, Glycine max
  Clone ID: 701100082H2
gttcaaatgtccaaggatggaatacccttttgcttaagctctatagatctatcagagagcacaacagttgctgatacacaattgaaaaaccgtgcaacgactattcccgagattaaatatcgcagtggcatatatacattcagcttgacatgggatgagataaaaacattgactccctcaatattgaacccttatgagaaatacatattgtcccggaatccaaaatccaaaaatctaggaaaacttataaccttgtctgac

SEQ ID NO: 24984 - DNA, 259 bp, Glycine max
  Clone ID: 701100044H2
ccacgatatggtcttgaagtaggacttactagttatgcagcagcttattgcactggtctcctgttggcccgaagagtcctcaaaacacttgaaatggatgaggagtatgaaggaaatgttgaggctactggagaggattattcagtggaacctgccgagagcaggaggccattccgtgcactccttgatgttggtcttgttaggactacaacaggaaatcgcgtctttggtgcccttaagggagctctggatgggggtt

SEQ ID NO: 24985 - DNA, 278 bp, Glycine max
  Clone ID: 701100015H2
cgtaggttgggaattcggctcgagcacgaatatcttgttgtttggagcgatccgagaaaaactctgtaaacatgttggtttaccaggacctccttacaggtgatgagcttctctctgactccttccgttacaaggaaattgagaatggaatgctgtgggaagttgaggggaagtgggttgttaaaggagcagttgatgtagacattggtgcaaacccttctgctgagggtggaggagaagatgagggagttgatgatgcagctgttaaggttgttgac

SEQ ID NO: 24986 - DNA, 266 bp, Glycine max
  Clone ID: 701100016H2
accgctgaagctcgctcttcctggacggagcaaccgagaccttcctatctgaactcctcttgctcttcgctttacgatatcctcggcatccccgctggcgcctctaaccaagaaatcaaggccgcgtaccggcgactagccagagtctgccaccccgacgtggcggccatcgaccggaaaaattcgtccgctgacgaattcatgaagatccacgccgcgtactctactctttctgatcccgacaagcgcgctaactacgatcggag

SEQ ID NO: 24987 - DNA, 277 bp, Glycine max
  Clone ID: 701100017H2
tcggaacccagttatcatggaagacacacagcagtaactgctcctcggactataaattttcaacctattgctgtcccttccatcacagtagatgaattgaagtctttgacagataattttggctcaaaatatttcattggtgagggtgcatatgggaaagtatatcaagccacattgaaaaatgggcatgcagtagtaataaaacagttagattccagtaatcagccagagcaggaatttctttctcaggtctccatcgtatcaaggctaaagcatg

SEQ ID NO: 24988 - DNA, 260 bp, Glycine max
  Clone ID: 701100018H2
ataatagcacgcactcttttcattctttctctgttctcatttcatcttctacacgcgtttctaatcattattagactcgatctcaacgatgaaggcaacactgctttgtccttgttcttctgctcctctgattctcgacacgcatagcaaccgaacctcggcaacgagacacgcttccaccgttgtttgttgttcgtcgaggaatcaaccctacatcccgaagctcgagccttttagccgaaccaaatttgaaagggccg

SEQ ID NO: 24989 - DNA, 269 bp, Glycine max
  Clone ID: 701100019H2
caatatcacacataatataattccaaaatcactcctattgctatagcaatatgatgggtgacactgagatcaaaccatcagttgaagtagtcatatgtgcttccatgaacaataacaatcgcgcaaacaaccacaccctcccaaccgacatcaccaactcatcacaatcacacttaccaatcttgaccaagctccatgctggttactttttcatatgcctttcctttggtgcacaagctttgctctggaagagtttgagtaaacacaac

SEQ ID NO: 24990 - DNA, 266 bp, Glycine max
  Clone ID: 701100020H2
acccaccgcggcggcggctgggcctcctccgacgagatcacgaccgtctggctcggcgacctccaccattggatacccgagaactacctccacaactgctttgctcacaccggcgaggttgtgtcggccaaggtcattcgaaataagcaaactggtcagtctgagggatatggattcgtggagttctattcacgagcgacggctgagaaagtcttgcagaactataatggcacgatgatgcccaatacagatcaggcattccgtct

SEQ ID NO: 24991 - DNA, 267 bp, Glycine max
  Clone ID: 701100021H2
ctcggatcccgactcgttcttcgagcccgagtcaccaactcatggcgcgggaactcactcaccacctttcactaatcctattcctcatcgccaccgtcgctggcgacaccgcgctcctccgcaaccgccaccacggttctcgcccttccatgctccttcccctgtacctctccgcaccgaattcctccacgtcagcgctcgatccccgtcgccagctcaccggatccgagtccaaacgccaccctaacgcacgcatgagactccacg

SEQ ID NO: 24992 - DNA, 264 bp, Glycine max
  Clone ID: 701100022H2
tgttttccttatcattgtgtctctatgacagaacagaactctcttgggtgttggtgttggtgagggatctgaggcaaaggtgttgatgatatgggagcgtgtgtttcaactccacaagggtgcgtgggagggaggttgagctcttccaagaagaaaaccagaaagagaaggagagagggactcagaagaagagttacttctcggttgtgtaaggaatcatcggagaaagttgatgtggcagggttgcctgattgttcctttgct

SEQ ID NO: 24993 - DNA, 263 bp, Glycine max
  Clone ID: 701100023H2
atggaatgaaaagtttgattcttcgataacaaaagactatgattttcaccttcttgatggccgttcaatcagggttcccttcatgacgagcaggaagaatcagtttattagggcttttgatggtttcaaagtccttggtcttccctacaagcaaggtgaagataagcgccaattcaccatgtactttttccttccagaaacaaaagatgggctgttagctttggctgagaagttggcttctgaatctgggttcttggaacgca

SEQ ID NO: 24994 - DNA, 258 bp, Glycine max
  Clone ID: 701100024H2
cggctcgaggagaaaagttagggttcacaacttttccttttccttttgcttgcgaatctgaatcaaataatcaatcatccattcattattcatcatgtcgaccggcgaagaaaatcacgctgaagagttcggacggcgaggctttcgaggtggaggaggcggtggcgctggagtcgcagacgataaagcacatgatcgaggacgactgcgccgacagcggcatccctctgccgaacgtgacgagcaagatcctggcga

SEQ ID NO: 24995 - DNA, 262 bp, Glycine max
  Clone ID: 701100025H2
cgataactatgatttgacaactgatgaagtagggatagaatctaagcaaagaataaccacagactgtgggggaataattgagtcagttgataagccaacaacatctgaagtaggtttagaatcaacccccttttctagtgatattggtcagcaaaatcccaatttactagatcttggcgatgcctataagctagctgtcagtaacagcagaggaagacctggcatgcttgtagagcattggcttggaaaggattctacaaga

SEQ ID NO: 24996 - DNA, 260 bp, Glycine max
  Clone ID: 701100026H2
aaaagacttctgcatacccgttgatggaggaatggatgtattagcatttgaagatttcttgcttgaggagaaacgtaaagaattagaagaacttgcttgggcacaacctgaaagggaaagacaagctgaagatcaaaggcgagtggaggcagacagagctgcaaaggaagaggacagggcacgggcgaaggcggaggttggaagaatgcgagacacattgccacaattgttgaaaaatgctgtaaagtccattgataatg

SEQ ID NO: 24997 - DNA, 260 bp, Glycine max
  Clone ID: 701100027H2
agagggagtcagagaaaccctaggtaagaagaaaagatgccggctggtcatggtttgagatcccgcaccagagattccttctctcgtcctttcaggaagaagggaaccatcgccctcaccacatacctgagaacctaccacgtcggcgactaggttgacgtcaaggttaacggtgccgttcacaagggaatgccccacaaattctaccatggccgcaccggacgcgtctggaatgtcaccaaacgtgctgttggcgtcga

SEQ ID NO: 24998 - DNA, 140 bp, Glycine max
  Clone ID: 701100028H2
atcgagcgaatcggctcagggctcgagggtccttccctactaccagggtggtgtaccttgatgtatgtcacttacgaagtggcacgtgactagacaatgagcttattgggaattttgtggttggagaataagagtttatg

SEQ ID NO: 24999 - DNA, 262 bp, Glycine max
  Clone ID: 701100030H2
acccagcgaatcggctcgaggccctcccaacctctatacttcacaaaacccaaaaacaccagaaataccataaaatttttcagcttctccgccgccgtacagccaccacctccgttcggatctccggcggacctactatccctactactctatttacacggaagaacaaaaaaactatcccacaaaacaaaaattccaaaagcggttcggttagggtttagttttttttttatattctttcgtgtatctaatttttcatcag

SEQ ID NO: 25000 - DNA, 141 bp, Glycine max
  Clone ID: 701100031H2
aatgctggtaatgctgccggaaagagaaataccagaaccttggcgcatcatattgtttattccctcacttggatcgttaattccgcgaacgagcttctgccgttcaaattaaccatggagaatattggtgaggagtacggc

SEQ ID NO: 25001 - DNA, 139 bp, Glycine max
  Clone ID: 701100032H2
cataacctaacctaacccttgcgacttgcgacttgcgagtgagagtgaggttgggtttggaaggcaagggcttgtgttgtcacaatccaagagagaagtaatggcgaacatagacatcgaaggcatcttgaagcagcag

SEQ ID NO: 25002 - DNA, 149 bp, Glycine max
  Clone ID: 701100033H2
gttagaaacaaacttagcctcgtggcagttcggggcattattaatgcactatccattctcttcacatcccatttaacgcttggttgcacaaacctcacctcaattccaaaaccaccacccctattggtcatgtaaaacacaccacaaca

SEQ ID NO: 25003 - DNA, 267 bp, Glycine max
  Clone ID: 701100034H2
ctactcactcactcatcagagctatatattaattttcttctaccaaaaaaacgcaaatcaggtgacgttgcactactctgctcactcgctccattgtctatcgattccttcaaatcaggtttttgcattgtgatcatgacattcgttgctgcacactgttctggtcatcaccacagggaattggaaaggagcattggtgtcatcccttgaagaatttgagtcaagaagcaaggggccaacaaccttaagagatattggactaagaag

SEQ ID NO: 25004 - DNA, 263 bp, Glycine max
  Clone ID: 701100035H2
gttctacagtcaagttgttcaaacacatggctcagcaaagaatttgcctatatcctgcacttcaagactcagttcagggctgtgctttttctctcaaaatgtcgtgtcccaaatcagtaccccaatcttctttgtaaatgcagcctatgactcatggcagatcaaaaacattttggcaccaggtgctgctgatccccgtggccaatggcgtgaatgcaagcttgatatcaaaaactgctcacctaatcaactcagtgtaatgc

SEQ ID NO: 25005 - DNA, 263 bp, Glycine max
  Clone ID: 701100037H2
ctcgaccgctcgagccgtcgtgaagttggactcacatttcacctcctcaaggatgaccccgggaacctctcaaagaacattgataaggcactttttgaggctttcaacccattgaacatctctgattacaactccatcttttggattgcacaccctggtgggcctgcgattttagaccaagttgagcaaaagttgggtctcaaacctgagaagatgaaggccactagagatgtgcttagtgaatatgggaacatgtcaagtgc

SEQ ID NO: 25006 - DNA, 263 bp, Glycine max
  Clone ID: 701100038H2
cggggctaccgtgagtttaagcatatcaataagcggaggaaaagaaactaacaaggattcccttagacaacggcgagcgaaccgggaaaagcccaccatgaaaatcggtcgccctcggcgtccgaattgtagtctggagaagcgtcctcagtggcggaccgggcccaagtcccctggaagggggcgccagagagggtgagagccccgtcgtgcccggaccctgtcgcaccacgaggcgctgtcggcgagtcgggttgtttggg

SEQ ID NO: 25007 - DNA, 260 bp, Glycine max
  Clone ID: 701100039H2
tccagagccagcattacgccggggtgattctgtttatcttgtggggttgagtagaagcctacaagcaacttctagaaaatcagttgttaccaatccttgtgctgcattaaatataggatctgctgattcccctcgctatagagcaaccaatatggaagtaattgagcttgatacagattttggcagtacattttcgggtgtgctaacagacgaacaaggaagggtccaagctatatggggaagcttctcaactcagctga

SEQ ID NO: 25008 - DNA, 263 bp, Glycine max
  Clone ID: 701100041H2
ccaatatattccattctctctgtgtatttccctacctctcccttcaagatcttcgtcaagaccctcaccggcaagaccatcacccttgaggtggaaagctctgacaccatcgacaacgtcaaggccaagatccaggacaaggaaggaatccccccggaccagcaacgtctcattttcgccggaaagcaacttgaggacggccgtacccttgctgactacaacattcagaaggagagtactcttcacctcgtcctccgtctccg

SEQ ID NO: 25009 - DNA, 261 bp, Glycine max
  Clone ID: 701100043H2
aaatcttggagcactgcattctttggtagctggaggcacagctcatcagacagtgttgttgccacaaacaaagagggttcaaatgacactaaaaaatcaggaaaagtaggttctcaaagtagtggaaatgatcactcttcttccaataaaagatcgtccaatgaaattttccctgaaccattggaaatacaagatgtggagacaggagtgacaagataaccacttgtgaaatgggtttggttattctttagtctgtgagat

SEQ ID NO: 25010 - DNA, 138 bp, Glycine max
  Clone ID: 701100012H2
cggtggcaataagtccaatgaagttgctgttggtgttccgatatggtggaactaccccaacattatttagagattaattttttaaatttacattatttattttttataacggtcaagcatcatagaagaagttcagtt

SEQ ID NO: 25011 - DNA, 269 bp, Glycine max
  Clone ID: 701099985H1
agtttgttgtgagctataagctagtttatcgtgaggagaatatgaagttgtttgttttctttgttgctgcagtagttttggtagcatggccatgccatggcgcaggctaccaaaggttccctctccgaatgaaaactggctatggtgagcgttcttcggaggtaaaatgcgcaagttttaggcttgctgtggaagcacacaacatccgagcctttaaaaccattcctgaagagtgcgttgaaccaacaacggactacattaatggcgaa

SEQ ID NO: 25012 - DNA, 283 bp, Glycine max
  Clone ID: 701099986H1
cttgtttctgtttgagtcgagtcgagtctcttctcttctaatctcctccatagcatattttgacccgatccaaccctcgctttgctagatctcttgatgatgggttccgttctagaggacaagatagaccgtcatagttttcacgaccaccacgacgccgacgatactcccttagcatcttcctcttctaaagtcctccaacaattacacagcttcgattttgaggacacaagcgttgtagatttgcggagctcatccatctttaacacaacacgtatcagca

SEQ ID NO: 25013 - DNA, 265 bp, Glycine max
  Clone ID: 701099987H1
tatacttgaaaccagtgtgtacccaagagagcatgagagcttgaaggagctacgagagttgacggaaaaacacccttggaacctgatggctacaccacctgacgaaggacaacttctaggcatgctccttaagcttatcaatgccaagaacaccatggaaataggcgtcttcactggttactccttgctttccactgcccttgccctcccttctgacggaaagatcttagctatggatgttaaccgggaatattatgaattgggg

SEQ ID NO: 25014 - DNA, 271 bp, Glycine max
  Clone ID: 701099988H1
ctcgagccgtgctgtcaccaccccacgatctaaaagaagaaagaaccagcttaagaaagtttaccaagtaccagttgagaatctctcttcagacatatgggcatggaggaaatatggccagaaacccataaaggggtctccatatccaagggggtactatagatgtagcagctcaaaggggtgtttggcaaggcaacaggttgaaagaacaagatcagacccaacaatgttcatagtgacttacactgctgagcacaaccaccctgaacct

SEQ ID NO: 25015 - DNA, 273 bp, Glycine max
  Clone ID: 701099989H1
tttcaggtcatcacgtgatactcaggcgccgaatcggaaaccagcctatgacaaggcagaacctgggaggataaacccactcattcaccccaccaccagcatcaaagaagccagtctactctggcactggcatggttgactatctcagtggtgatacatacaagacagaaggatctcctgaaaactcagaacccacttcaattgcagctccccttcattctagccctaatccaacctcatcaactattccatctctgtcttcctcacgtcctc

SEQ ID NO: 25016 - DNA, 280 bp, Glycine max
  Clone ID: 701099990H1
ctcaaaccttgagtagagaagtgcttgagggccagagaaagctagtgacgctcgcagctacaagaacaaactctggcacattaaatactctgcctgtccagctaaacaatggtcctttacttcatgaaaaggtcgaggtgcctctagatcccacacaagagctagctccgttgatttctgaacggaaatatgaggaggctttcattggggctctacatagaagtgatgtatccattgtatcttggttatgtactcaggttgatagacacggacttttgtc

SEQ ID NO: 25017 - DNA, 282 bp, Glycine max
  Clone ID: 701099991H1
ctcaaaccttgagtagagaagtgcttgagggccagagatagctagtgacgctcgcagctacaagaacaaactctggcacattaaatactctgcctgtccagctaaacaatggtcctttacttcatgaaaaggtcgaggtgcctctagatcccacacaagagctagctacgttgatttctgaacggaaatatgaggaggctttcattggagctctacatagaagtgatgtatccattgtatcttggttatgtactcaggttgatatacacggacttttgtcaa

SEQ ID NO: 25018 - DNA, 281 bp, Glycine max
  Clone ID: 701099992H1
cttatgcaactatagtgaggctaagagattggtccataattaatcaaaatgttggctatattccacaaagcttttgctcatccacctgaagagctcaacagccctgcatcttacaaaggttccaagaagcctaaggttcccgaggaaactctcaaagatttcctttcccaccatcctcacaacacttgctctatgagctttggtgatgctgctgttctagcttatgtccgtcctgatcaatctttctctcgtcatcaaaggctattttgtgggatcgatga

SEQ ID NO: 25019 - DNA, 280 bp, Glycine max
  Clone ID: 701099993H1
agagaacctcttttcctttacatttacctttcattcatacaagctcataagtcaattttggtttatcattcctagaagaaggaacctttaaccattgacatggccatggcatatgttgctagatcatcggagtcatctcaagtgcttaatttccattccactgctaaatggaatgctcactttgatgccttgaaacaaactaacaaactgatggtggttgatttcactgcttcatggtgtggaccttgcaaactcatggaccacattatccaagagtttg

SEQ ID NO: 25020 - DNA, 283 bp, Glycine max
  Clone ID: 701099994H1
gatgcccccggggcaaaggagtatgtgcacatacgaattcagcagaggaatggaaagaagagtctgacaacagtgcaagggctgaagaaggagttcagctacgagaagatcctcaaggacctcaagaaggacttctgctgcaacgggactgtggtgcaggacaaggagcttggcaagattatccaactccaaggcgaccagcgcaagaacgtatcccatttcctcgttcaggccggtcttgtccggaaggaccaggtcaagatacatggtttttgatttaacg

SEQ ID NO: 25021 - DNA, 272 bp, Glycine max
  Clone ID: 701099995H1
aacaagaattcatctattcatttcagcccatcagcatggcgaaggagaagaaaaacttgtccaacaagaacaagaagccaagcaatgtccacgaggttcacttccgcggagtccggaagcgcccctggggccgctatgccgccgagatccgcgaccctggaaagaagacccgcgtctggctcggcaccttcgacaccgccgaggatgccgcccgcgcctacgacgtacgcgcccgaaattccgtggccccaagccaaaccaaatccccttct

SEQ ID NO: 25022 - DNA, 285 bp, Glycine max
  Clone ID: 701099996H1
ctcgagccgttcgtctcggcttgtctttcactttctcaaccacccaacacaacacaaattccctttcttcttcttcttcttcttctaaatagatagaaggaatttagattaattaacacaacctttcattcattctgttgtgttgggaaatatgatgttcgactttgccaggctttggacccgaaacacgttaataggtctcggcttgggtccatttctttctcttctcatcacttccaccggcttcacttcctctgaattggctaaacaaggtattaatgctcc

SEQ ID NO: 25023 - DNA, 153 bp, Glycine max
  Clone ID: 701100001H2
ctgagccatatcatatcagatcctgcttcttcttcctttccctttttctcactcccactcttcaaacttgcctcactctcaccaacacccaacaaacaaagttacttcattgcaaactctatattagtctttactctatttgtttattccaca

SEQ ID NO: 25024 - DNA, 284 bp, Glycine max
  Clone ID: 701100002H2
gctcgatctcaacctgcaactcctaatccaacaaacttttttttatttagaaaccaaccaagttgtgttatttctatttggtttggctatatctctatggcactagtcaaagacctatgctaaccttttcttctccctctaaatacaaattctgagattcatattcatccgtctgtgtacaaaatggcaggataggaagactgcttcttggtttctaatttcacagtggactttgctgcccggagattctgccagctaaagacaaataaagatataggtgctat

SEQ ID NO: 25025 - DNA, 272 bp, Glycine max
  Clone ID: 701100003H2
gctgttcctacaatcattccaaatgtgcccttccggtcgcaccctcctcccttcctccgtctccgatttccgaccggcattcgacgtcctcgatgccgaccgcgacggcaaaatcagccgcgacgacctccgcgccttctacgccggagtcggcggcggaggagatgacgtgatcggggcaatgatgacagtggctgacaccaataaggacgggttcgtggagtacgaggagttcgagcgcgtggtctcggcggagagaaagcccgtggggt

SEQ ID NO: 25026 - DNA, 269 bp, Glycine max
  Clone ID: 701100004H2
gaagtattgctcagcatggagttgaattgctatatgcaactttgacaaagatatttagttcactgcaagaagcatataaaggtcaaattgttggaattatctactgtcacgtggccactatccaagagtcgggcaagaagtttgatgtgatatttactcctcaccatccgtatgctcgatggttggcagaaacaaatgcagtgaatgcaacattgccagaagtggtgctggttaggagaacccttgcttggataacaggaattatattg

SEQ ID NO: 25027 - DNA, 265 bp, Glycine max
  Clone ID: 701100005H2
gaagaattaaaggaagcctaactggtgtaactattgggactgtgacagaatcccaaaaaatttggagaactttccaagcgcttggaaacatagcctttgcttactcctactcaatgatccttattgaaattcagaaaacaacacaaacaacaaattgaagtctaaattaaaatggtggttgttatggaacaggacacaatcaaatcccctccagcagagtcagagacaatgtccaaggctactttaataagtgttttggtcacaa

SEQ ID NO: 25028 - DNA, 263 bp, Glycine max
  Clone ID: 701100006H2
actcgagcgaatcggctcgagttggaagtgatctaagttgactgaaagtgagagcactgtcgttcgcagtggcaacctgttcaacgtcgtcgttcttcccttcaggtttcgcaattcgcaatccaaagcagcttcaacctttcgtttcaatgtcactgtcttcgaagctaccgttgcatttctccggcaatgccagattcaaccgcaaccacccaaccatgttcaaaattcgagcctcaaattcaaactcttcatcttcatcc

SEQ ID NO: 25029 - DNA, 262 bp, Glycine max
  Clone ID: 701100007H2
ctgggaatcaattgttttgacggtagttgccactgccggcaacaacatcggcaaaatccttcagaagaagggcactgtcattcttccccctctctctttcaagctcaaggacataagggcatatgctttgaacaaaacctggctcataggttttgtaatggatatatttggggcactgttgatgttaagggcattagctcttgctcctgtctccgtcatccaaccagtttctggctgtggattggcattctctcagtctttt

SEQ ID NO: 25030 - DNA, 263 bp, Glycine max
  Clone ID: 701100008H2
ctttcttcctttgtaatagaaagcacgcgtttctctctctccctctctcaacgaatatttgtgtacttcctcttttgtgggtagattcaatttaccatgtcgagttcatcggaatactctcaattttccggccagaaaccggcgaggtcgccggagaaatcgagcttctctcagacttgtagcctgttgagtcaatacatcaaggagaagggtagcttcggagatcttaccctcggaatgacatcatgtgggtcacctgagac

SEQ ID NO: 25031 - DNA, 267 bp, Glycine max
  Clone ID: 701100009H2
caaatccgcagcaactattgagggattggcagcgcagcttcgccaagagtcgtcgcaacattgagcgccaaattcgcgatatacagagagaagaaaaaaatgtgcagaaggctattagagaagctgcaaagaggaatgacatgggctctgcaaaggcacttgccaaggaacttgtgagatctaggcaaactgtgaaccgcctttatgaaaacaaagcacaaatgaattcaatatcaatgcaccttggagagagtgttgcaattgctc

SEQ ID NO: 25032 - DNA, 264 bp, Glycine max
  Clone ID: 701100010H2
cttcgttgtccagtgggttatctaatggcggaagtgtctcacgagactttgacttaaataatggaccaggccttgatgaagttgggagtgaagtcccaacacgtagtcagccaatgaaaagtactgtaccatttccaactgctgttcatggcacgagagcaaacaatgctgaatttgggaattattctgcatggtttcctcctggcaatacttattctgcaattactgtcccaccacttctgtccggcagaggggagcagagtt

SEQ ID NO: 25033 - DNA, 264 bp, Glycine max
  Clone ID: 701100011H2
agaggaggatgatgatgacgacgagtgaagatggtgatacaagatgaagcgtaggaggatgtgggaaaagaaaattgttttgcatagtagttgttgggtttagaatttcataggatggttcccaacccacatccctttatgataattagtttctgaatttttattttgtcctcccttactagggttagattagcgcacaatcgtaattagggttcagtatcatgatcatgtacttaaaagtcaatgctatgatacgtttcaatt

SEQ ID NO: 25034 - DNA, 282 bp, Glycine max
  Clone ID: 701099983H1
gttcaaggttcctgtcagttgtgaacacgaaagctttgaacacagaagctttgaacacggaagctgtgaacactgacagtcctacatttgctgcttctcccaagagtgatgatacgtcaaaaaagccccagactaccaatgaacagggagttggtaatggatctgtttataataaaagtgaagatgggtctgtaaaaagtgctcccaatagtccatttgctagcagtgctattggaagcccgcatggggattttgattctaccataagacagacagctggtg

SEQ ID NO: 25035 - DNA, 288 bp, Glycine max
  Clone ID: 701099955H1
attgaattcaaggataaagttaagaatgttggtgccagtcttgtaaagcaggttgctaatgctactaatgatgtggctggtgatgaatattgagggagggagcatttcaattgtcttgcaggaaccacatgtgctacagtccttacacgagcaatatttactgaaggctgcaaatcaatcgcggctggaatgaatgcacatggacctgaggcggggtataagtatggctgtcgatgctgtggtcacaaatttgaaaagcagagctaggatgattagcacatctgaaga

SEQ ID NO: 25036 - DNA, 96 bp, Glycine max
  Clone ID: 701099956H1
attttacgttataactatcaacttaaaattacacatgaaacatagaaaattacattgtgtaattttaagttgatagttataacttatatttcccaa

SEQ ID NO: 25037 - DNA, 287 bp, Glycine max
  Clone ID: 701099957H1
gcttcctcaaaatttcgccctctttcattcaattctcttctctgctcttctcttctgttcccaccttctgatccatcatccctcgttttctccgaacaatggctgctggtgtcactgtcaagtccgaggttctagaatcttctccccctgaaggagtatgttccaacacggaggaaaaccacctggttcagaccaatttgtctgatgggtcacccaacaagtatgtttctaacaagtctgtgccagcatctggacttaatgcagtgattcctagtgcacatcagctt

SEQ ID NO: 25038 - DNA, 286 bp, Glycine max
  Clone ID: 701099958H1
tgagaaatttgtgttcaaggtagaatatcctacactgagtaattcatacaagattatcttaaaaatcatggacaaggatcttttatctgcagatgactttgttggtcaagccatagtctatgtggaagatttattagccataggggtagaggatggtgcggctgagctacaacctctaaagtacagagtaattcgtgcagatcaatcttattgtggagaaattgatcttggtataacttttaaggtggaagaagagttcaatggagaagctaaacgaggatcgaag

SEQ ID NO: 25039 - DNA, 265 bp, Glycine max
  Clone ID: 701099959H1
gttcggagcactagaaaagaaaaccataattaagatgagaacaagcaaccacttgatcggtcttctgaacttcctaacgttcctgctgtcgattccgatcctaggtggcggaatatggctgagcagcagggccaacaacaccgactgcctcaagttcctgcagtggacgctcatcatcatcggagtcagcatcatggtcgtgtccctcgcggggtttcgcggcgcgtgctaacggaacacctcctcatgcgcctctacctcgtcg

SEQ ID NO: 25040 - DNA, 282 bp, Glycine max
  Clone ID: 701099960H1
cacctcccaactcgccctcgactcacatccttgtccgattccgcgaacgagtcgagttaatcgggttggtaaggtaagatctattctgtttcttcgtcatggcaaccggacaactattctcgcgtactacacaggctttgttttacaactacaagcacattcccatccagcggatgcttgattttgacttcctttgcggcagggaaacaccatcagttgctggaataattaaccctggttctgagggatttcaaaacttttttttgatcaggaggaaattgc

SEQ ID NO: 25041 - DNA, 286 bp, Glycine max
  Clone ID: 701099961H1
cattccataaatctctgtagcccctcctcgattttaccgcaacatgacacaagaaggaaatggcaacaccaacttctgtatgagtgttaacaacaacggctacattagcgctaatgacccgttgaactggggcgcggcggcggaggcgatggccgggagccacctcgacgaggtcaagcgcatggtggaggagtaccggaggccggtcgtgaagctcggcggcgagaccctgacgatctcgcaggtggcggcgatcgcggcgcacgtaccaggggtgacagtggac

SEQ ID NO: 25042 - DNA, 286 bp, Glycine max
  Clone ID: 701099962H1
attttggtgcgtgcaggtcccggtgttagaattggggtttccgtttcgattgtacctaccggccaacttagggtgcagtcactctcgatctcaccgatcaccaacgtgccttcttctcctcaggttcccttagtcaactttcggttttttgattgttgaggatggtgctggttttagccctgggggatttgcacataccccacagggcacctgatcttcctgcaaagttcaaatccatgcttgtccccggcaagatccagcacattatttgtactggaaatttgtg

SEQ ID NO: 25043 - DNA, 233 bp, Glycine max
  unsure at all n locations
  Clone ID: 701099963H1
caatctccttttgtccaagacaaacacaacaatggggaaccaatcctcttcaaacaagatagaaactcttcccatccacacaacatacaacacgacaacaaatatancagtctggncanaaggtggtggatttgntaatggaaccatcaacataggagggctaaaattgtttcaaatttcaacattccacaaagtttggcaaaccttagtaggtggaccaggtgctgcagggg

SEQ ID NO: 25044 - DNA, 122 bp, Glycine max
  Clone ID: 701099964H1
gagaaaggcactgtcctgaagaacctcctacctgccttgttcctgttcctgaaggttataaacgcccaattgagtggcctaagagcagagagaagatatggtattacaatgtttcacacaac

SEQ ID NO: 25045 - DNA, 281 bp, Glycine max
  Clone ID: 701099965H1
cgctgttcctacaatcattccaaatgtgcccttccggtcgcaccctcctcccttcctccgtctccgatttccgaccggcattcgacgtcctcgatgccgaccgcgacggcaaaatcagccgcgacgacctccgcgccttctacgccggagtcggcggcggaggagatgacgtgatcggggcaatgatgacagtggctgacaccaataaggacgggttcgtggagtacgaggagttcgagcgcgtggtctcggcggagagaaagccgtggggtactgtgggg

SEQ ID NO: 25046 - DNA, 281 bp, Glycine max
  Clone ID: 701099967H1
ggttctttccttttctctggtctgcttgctggcatactctatgatatggaggcaactacaacagagggaggaggcaacacatgtgttggaggtcattgttacaggctagtctttattgtcatgactggagcatgcattgttggattcttcttagacattctgttgtcaatcagaaccaagaatatttacaccaagatttccacgagcaagaagcccaagaaatccttaggaacatcaaataggcagtgattcagaatggtatgacattcctgggattgatg

SEQ ID NO: 25047 - DNA, 291 bp, Glycine max
  Clone ID: 701099968H1
ctcgaggttaaacaaggtatttcaattatcgtgtcttcttggctctctgtttagggtacgaacctatccatgtctccttttccttcatactctctttttcccttaattgcttttgtttgaactttatatcataattgtgctcatacgttgacttttcatactttttcatcaagtttgtatacatagtttgtttggttgaaagggaatctccgtttatgttctcgtaataatgaattttgttgtgcaaactatgtctggcttaattatagtgtcagagttgttggattctta

SEQ ID NO: 25048 - DNA, 283 bp, Glycine max
  Clone ID: 701099971H1
agttgatatagacaccagaagacggggaaaacggagaatttagtgttttccttgtgcaggcaaatccattattgtgaattacttgctatctattgctccaaggtccaagtgggatgaagagtttagcagatagggtacccagcttcctagcaagatccgtagtgcactcgcatctcttcctcagattttgacgatgtgcgtatgtcgaacaccaagtgagcatcaagaccagatccgtggcgcactctcaacactttgcggcgaagtcaaaaccgtttggaga

SEQ ID NO: 25049 - DNA, 285 bp, Glycine max
  Clone ID: 701099972H1
ctgcagtaacatggctttttcatggatgatgcaattgtatcaggtgatccattctttttacagatctgaaggtgttagtcctggaagtgaaataccaaagtggttcaataatcagcatgagggaaattgtgtaagcttagacgcatctcatgttatgcatgacgataattggattggcgttgcgttttgtgcaatattcgtcgtacctcatgaaacaatctcagcgatggctttttcaaaaacagatgggtactactcgggttttaatgatattccagtggattt

SEQ ID NO: 25050 - DNA, 275 bp, Glycine max
  Clone ID: 701099973H1
ggcctatcttcacaatgaaccaaatgttataattcatcgagacttaaagccaaggaatgttcttttagtcaattctagtgccgaccatttaaaagttggagattttggattgagtaagcttatcacggtccagagttctcatgatgtatacaagatgactggtgaaactgggagctaccgctacatggctcctgaagttttcaaacatcggagatatgataagaaggttgatgtgtactctttgcaatgattttatatgagatattgaaggtgaa

SEQ ID NO: 25051 - DNA, 279 bp, Glycine max
  Clone ID: 701099974H1
gcgagtgagtgagcgagccaggtagggttttcggtgttcccctctttgtgttcgttcgcgacgatggggtccatccccgatccaggcgagttgagcgagtaggactcagccgagcttcgacgagttccagcgccaaacctctctcatgaccagctgcaccctcctctggaaggagctctccgaccacttctcctccctcgagcaagacctcaaccacaaatccgaagccctcaagcgcaagattcacaccctcgacaactccacctcggactccctccg

SEQ ID NO: 25052 - DNA, 280 bp, Glycine max
  Clone ID: 701099975H1
cggaacgttgctataaacgttgttgttttcagataaacacgtgactcactatctatctatcaatcgatatctccgagttcagccgaaccaaactccgaagctatggcagagctccaaaccaaggttgaacctgttacggtcccggctccggtggatcccgagccaccgctagctgaggctccgccgctcgagaagaaagcggtggcggtgccccacctgttccggctgcggcagaggaaaccaaagctcttgttattgtggagaggagaaggagaatgag

SEQ ID NO: 25053 - DNA, 286 bp, Glycine max
  unsure at all n locations
  Clone ID: 701099976H1
gtccactcctcatcctccctactactacaaatcccctccaccaccaacgtcgcctcagtnnancttaccactatgtgagccctccaccaccttctccatctcctcctccaccataccattacacatcaccacctcctccttccccagctcccgctcccaagtacatttacaattcacctccacctccagtttacatatatgcttccccacctccacctatctacaagtacgtgcgaattgcggaacaccattcacgataaatcatgtactagtttttatcgaggaa

SEQ ID NO: 25054 - DNA, 278 bp, Glycine max
  Clone ID: 701099977H1
atttagaggggaaggcggctatgggaatgggatgaggaagacgagatcgtatggggacatgagtgaatcggtggggagaggggaagagaagagggttgtgagtgtgactccgctgagggatatgacgccagagagggttttcgggaagatgggacatttgcagaagttgttggatcggtttttggcttgtaggcctactgggttggctaagaatagcaggatggttttgattgcgctgtatcctgtggttaaggagagttttaagttgtatgctgata

SEQ ID NO: 25055 - DNA, 279 bp, Glycine max
  Clone ID: 701099978H1
gtttgacaacctctgcaaggtgatcaaggatgttttgggtgacaaggttgagaaggttgtggtctctgaccgcgttgtagattcaccatgctgtcttgtgactggcgaatacggttggaccgcaaacatggaaaggataatgaaggcccaagctctaagggacaacagcatggcagggtacatgtcaagcaagaagaccatggagatcaaccctgagaacccaatcatggaggagctccagaagcgtgctgatgcagacaagaatgacaaatccgtgaa

SEQ ID NO: 25056 - DNA, 284 bp, Glycine max
  Clone ID: 701099979H1
tatcaatactccaatggggaatgccttggggggaaagaaaaccacaaaggtgatgaagattgatggggaaaccttcaagcttaaaaccccaataaaagtttgtgatgtgctaaaagaccaccctggccttgttctgttagaatccgaggctgtgaagcattatggtataagagcaaagcctttggaagcccacaaggaattgatgccgaagaggctttacttcctcgtggaacttcccaaggaagtgacggtggcgccgaggcgggtccggtcggggatcaaca

SEQ ID NO: 25057 - DNA, 278 bp, Glycine max
  Clone ID: 701099980H1
gcaaatatgtattcagagttgcgggaagaggctcgtgatcatgcatgcttacgtaatgcatattttgagcaggcacagcaagcctatcttattggtaataaagccctagcaaaggaactaagtgctaaagggcaactgcacaacatgcatatgaaggttgctcatggacaagctcaagaatccatttacctccagaggtttgttgttctccatgctttgattcctgctctccatgtaagtttggaataaacaagtttatatggcagatgatgttatca

SEQ ID NO: 25058 - DNA, 283 bp, Glycine max
  Clone ID: 701099954H1
ctgcttttctcttccctctatcgtttgttctttccttcattcactctcgccgccgcgcgtgctaaaaaccgtctattccagaatgggcagcgagggcgtgccgtcgacggtggcggaggtcatgtcggtggcggccgtcgagctcactgacgcctccagctggtggcacgacatcgacgactctccgctgtggcaggatcgtatgtcctacactctcgccgtactctacggtatcgtggccaccgtagctttggttcaactggctcggatacatttgagagtg

SEQ ID NO: 25059 - DNA, 297 bp, Glycine max
  Clone ID: 701099919H1
tggatgtgcactgattgtcaactataagtttgttggtcactattaaattcatgccccatatgtactggatgaatgattattttgaggtcagtgtattgtctacaagtatttatttttcaacattctcccatcctcccttgtgtaatcttttcatgtgattttttggggacttctgtatggttggaaacttattttaaatgtacaagtgtctaaagaaagggcaaattgcccaaatttatgattatttttactggaagtgtgatgaaacattattgtgacacgaaaaaatttcataat

SEQ ID NO: 25060 - DNA, 294 bp, Glycine max
  Clone ID: 701099920H1
caatttaccagctatacttgttccttttgaaggttagaagtgctacaatacaaacaatggcagctactcaggaagatgtgaagcttttgggtattgtgggaagccatttgtgtgcagggtccagattgcccttaagttgaagggagttgaatacaaatttttggaagaaaatttgggcaacaagagtgatttgcttctcaaatacaaccctgttcacaagaaggttccagtgtttgttcacaatgagcagcccatagcagagtctcttgtgattgttgaatacattgatgagac

SEQ ID NO: 25061 - DNA, 277 bp, Glycine max
  Clone ID: 701099921H1
ctgctggggactctaacgagattggagccagtcccgacaatgcggcgtcgtataacggaaacttggttaaacgcgtgttgagtgggagtgggacccccttgaagcaaaatgagtcactcgatgttttcctcttcgcgcttttcaatgagaaccagaaaacgggtcccacgtcggagagaaactacgggctgttctaccccactgagaagaaggtttacgatattccgctcacggcggaggaaatcaaggaggcgccgccgtcaggagtagggaagag

SEQ ID NO: 25062 - DNA, 295 bp, Glycine max
  Clone ID: 701099922H1
cacatagcactcagcaataagaaggtccctattgtgattttccttcacggtggaggcttttgcttcggttcgcgcacctggccccatattcacaactgttgcatgcgcctcgcgtcggggctccaagcggcggtggtttcgccggactaccgtctcgcgccggagcaccgtcttcctgctgcggtggacgacgccgtggaggcggtgaggtggctccagaggcagggcctgagcttgagggaggacgcgtggttgagtgggggcgttgactttgaccgcgtcttcgtcgtgggtg

SEQ ID NO: 25063 - DNA, 286 bp, Glycine max
  Clone ID: 701099923H1
ctttgttgctcgtctagggactaggatggagtatttacgtttaagcctgtttctgtgcatgctgtcactgtcagcgacttcgccttcttccttcgcatcgccaaattcgatccgtgccgattatgccgttaatctgaacgcaacgaacttcgatgctgttctcaacgatacccccgctactttcgcccttgttcaattctatgcccattggtgccctgcatgcaggaattataagcctcactacgaaaaggttgcaagattatttaatgaacctgatgcagtgcat

SEQ ID NO: 25064 - DNA, 296 bp, Glycine max
  Clone ID: 701099924H1
ccggttcagcgctccgcctcctgcctctctttcttccttctccagcaactccggcagtcaccggagtgccagcgctaatgccaccgccattcctccgatttcggtcgccaggcctaacagatctccttctcctgcggtcggaactttgtagagcatactcattcggtacgttcaacatcagccggaagaccggcagtttcagttcgctcggcggcagtggtggctccgaacaaatccacactccgaacgcctatggctatacctcctattgaccctactaccaatcggaatagaga

SEQ ID NO: 25065 - DNA, 295 bp, Glycine max
  Clone ID: 701099925H1
cacgcacgtctctctctctctctcgccatggctatggctatgcaaagcggaatcggagtctccaagatcctcatcatagcaggagcaggttacaccggcaccgtcctcatcaaaaacggaaaactctcggatttaatcggcgagcttcagttgctggtgaagggattggaaaaatctggggagcatgctgaaggtgaaggtgaatatgctgatgccatagctgctcaggtgcgtcgcctggcgaatgaagttcggcagctagcatcaaacaggccaatcacagtactgaatgggg

SEQ ID NO: 25066 - DNA, 293 bp, Glycine max
  Clone ID: 701099926H1
ctcttgatgcacgtcttgatgtagttttccgtaaaaagcttccagagatccgaaagcagctctttggacaaattgttgcttgaagattttgattgtaatgtttggttacccctggaactatatcccgaagcataagcttgtcttcatgtcttggacctgaatagctatcaagccattgcttctgtgaacttataattattgtcccttaaattacgtcattttcggtagtccagttgtccggcgttctagatttgatttacttatgattgttatgacgacaagtgttttcagct

SEQ ID NO: 25067 - DNA, 283 bp, Glycine max
  Clone ID: 701099927H1
ggacttttatgctcctcttttcttctctgaagtagctacaattcagcctggagaattctgccacaaggtcaatctctgtcagaaaattgcatatattgccttgaaagttcaagatgatagctgtgagttttgccaagatactgtttcaactctattggaaaagttgaaggagagtgatactaagctagagataattgagacgttactaaaggtgtgcaattcagtggagaagtatgcaattaagtgccagagattggtttccaagattggcactggtttttga

SEQ ID NO: 25068 - DNA, 291 bp, Glycine max
  Clone ID: 701099931H1
ctttctgattgccttcaaatcacacactctcttcaatttctagggttttgctattgctttgcctccgttccccctttctcacaaaaacaacgccttttctcttctccttcgtatctattctttgcgcttcgtcttcggttgattgaaggcattcacagcgtaatttgttgctgcattttaatcgatttatctaaccaggactgattgagctaatggagtctaaatctgggaaaaagaagtctagtagtagtagtagtaaatcaattttttacgaactcccctcggatacag

SEQ ID NO: 25069 - DNA, 293 bp, Glycine max
  unsure at all n locations
  Clone ID: 701099932H1
attatttcatcgattctctcccttctctttctctctgcgacaccagatgatggagacgacggcgaacgaaacgctgtcgttgcgccaatcgcggcgttgttgttggtggtgctactcgcggcgagtgtggtggtgcangctcaggagaactcggacgtgaagacgctggtgaagcacatgcacgggaagaagtactgcgacaaaggatgggaatgtaagggctggtcaatttactgttgtaacctcactattactgattatttccagacctaccatttcgagaatctcttctc

SEQ ID NO: 25070 - DNA, 290 bp, Glycine max
  Clone ID: 701099933H1
cttcttcccaaccactactactcactcactgcagatctcaattgaatcgctgtccatggctaccatcgttagcatcaaggcccgccagatcttcgacagtcgtggcaatccaactgtcgaggtggatttgacttgctccgatggtacttttgccagagctgctgttccaagtggtgcatccactgggatttatgagggccttgaattgagagatggaggatctgactaccttggaaagggtgtatcaaaggctgttgacaatgtgaacaccgtcattggccctgctttga

SEQ ID NO: 25071 - DNA, 281 bp, Glycine max
  Clone ID: 701099937H1
ccgcaatgatgaagtgtttctcggtgtccttatcctctttatgggttctccttgctctctgttctctcagtgtgttatcgcaaaatatatctcagagtggcctacagcaagctagcctcccaccaagaggttggaattcctatgattgcttttgctggacgatttctgaagaagaattcttacaaagtgctgaaatagtttctcaacgtctcaaggctcatggatatcagtttgtcgtggtggattacctctggtataggaagacagtcacgggtgcttat

SEQ ID NO: 25072 - DNA, 292 bp, Glycine max
  unsure at all n locations
  Clone ID: 701099940H1
caggttctgaccttggaggatgttgtttctgaggctgatatctttgtcaccaccaccggtaacaaggacatcatcatggttgaccacatgaggaaaatgaagaacaatgccattgtttgcaacattggtcactttgacaatgagatcgacatgcttgggctggagaactaccccggcgtgaagcgcatcaccatcaagccccaaactgacagatgggtcttccctgagaccaacaccggtatcattgtcttggctgagggtcgattgatgaacttnggatgcgccactggac

SEQ ID NO: 25073 - DNA, 287 bp, Glycine max
  Clone ID: 701099941H1
atcaagtatgtctttgagccaaacaagaaaactgcttaaaagtattgagcggtttcatgttttagaaatcaaagattatgcatttttgttgcgggctacatagatcactctttatttcattgttatttcgttgggttttgataagaaccttactagaaaagctagccatgtagttcttgttctcatagctacaagtgattccagtttcagcatagttccatcatgttactgtgtttagagggtgacagtataataattgggccagatatggttcctaagttaacatt

SEQ ID NO: 25074 - DNA, 288 bp, Glycine max
  Clone ID: 701099943H1
gcgcagaacaactctggcggcggcgcaggagacgcgcagtctccgccggtttccggtggcggcgtggagagcggacacgttccggctgagtcgtttatgtacagctgtcaccttccttcggatgtgatttgggctccaacccctagaccacctttctgatcatcatcaatcaactctatttttaattcgtgcttgtgttgtgaattttgtttcgttaatctagttgtttgagttgtaatgctgctgttagcttatttagttctagttctaaattcaaaaacaatgatt

SEQ ID NO: 25075 - DNA, 274 bp, Glycine max
  Clone ID: 701099944H1
actcgagccgaatcggctcgagggcaatacttagcccaccacgggtacttgtcactcgaagagtagcgacccatattttgatcaaattggctgttctcatcctggttgtgagccagcttaccggactcccaagtgtgttaaaaagtgtgtaagtgggaaccaagtttggaagaagtcaaaacactatagtgtcaatgcatacagagtgagctctgatcccatgatatcatgacggcagtttacaagaatgggccagttgaagttgcattcactg

SEQ ID NO: 25076 - DNA, 288 bp, Glycine max
  Clone ID: 701099945H1
gccagaggactttcttttcttcataatgccaaatcacaagttatataccgtgattttaaagcatccaatatcctactagacgcagagttcaatgctaaactctctgattttggcttagcaaaggctggccctacgggtgatagaactcatgtctctactcaagtcatgggaactcaaggatacgcagcacctgaatatgttgcaacaggtcggctgacagctaaaagtgatgtatacagctttggggttgtgttgcttgaactattgtccagtagacgtgccgttgac

SEQ ID NO: 25077 - DNA, 160 bp, Glycine max
  Clone ID: 701099948H1
attcggaagagcttcaaagtcatgatttagctgatgctgtgaagcaaatgaaagaaaagcgcaggtttaaggagcttctgataatggtggacacctgccaagcctctactctgttctcccagcttcattcaccaggtgttttggcaattggaagtagtaa

SEQ ID NO: 25078 - DNA, 291 bp, Glycine max
  Clone ID: 701099949H1
attcggtgctccgaatctcagattctagggttagggttcccaatttctccaccgatcagaaaatgagttcaactggaggttctaccaagggcggaaggggcaagcccaaagcctccaaatccgtttcaagatcgcagaaagctggtctccaattccccgttggaagaatcgctcgattccttaaggctgggaaatacgccgagcgtgttggtgctggtgctcctgtgtacctctctgcagtgctcgaatatctcgctgctgaagttttggaattagctgggcatgctgcta

SEQ ID NO: 25079 - DNA, 293 bp, Glycine max
  Clone ID: 701099950H1
gacgcagcctccgacgcggggcattaccgccattgaagctgattcatgcttttttcaccgttcctcacaagaccaggtttcaagctattgccattggaaattaggacttcttttttgttactgaaaaattagagtagacaaaaaatgctcagacggaggctatctgttctctcaacatcaatcaccagaagctcaaattatagcaaacccagtctcggatacccatctatccaatctcatccctttcagctccctcactctcccagtgcttatcaaataattagtcctaatgc

SEQ ID NO: 25080 - DNA, 277 bp, Glycine max
  Clone ID: 701099953H1
tgggaacatgctacccattaatatggtcgattgacatgctataacacatgatccacttgtggtgattgtcaatgagggaagcgcagtgccagtgagattttagccggggcattacatgataacggtcgagctattcttgtggggcacaaaacatttggtaaaggaaagattcagagtgtcactcagcttcatgatgggtcagcatctttgttacagtggcaaaatatctatcaccagccctcatgacatagatcaggttgggataacccagatgtgc

SEQ ID NO: 25081 - DNA, 254 bp, Glycine max
  unsure at all n locations
  Clone ID: 701099917H1
caacccacaagaatccctccctttctggctttctctctctaaaactatcatgtcctccaccgcggctcccgtccttcccatatccaacccccaaaccaccgccgcacgcnggcgccatcgaggctccggcgaacaacccggccttccgcgccttcatcaacaacctctccgcgtccctccgacacggcctcgaccagcgccgcccgtggtcggacctcggggaccgctccgagttctcgaagcccgagtccttc

SEQ ID NO: 25082 - DNA, 263 bp, Glycine max
  Clone ID: 701099880H1
agaccagcgtgcaggttcttcaatcttctagagagagaaagttaaagattgaaatttggatcggagagagagagagagatggcgttgaatcctcaattgtttcctaatggaatgcccgttcctttcgtgaacgagatgtttgtgttggccagagacggcgtcgaattcgaggtcgataagattcctgcctctggaaatcatgggggtcatctcaaaacaaagggaatcgtgtatttgtcaaatattcggatggtcttcgttgc

SEQ ID NO: 25083 - DNA, 263 bp, Glycine max
  Clone ID: 701099883H1
cagaattctctaaaagagatctttttctgctctttgaagaaagaagggtctttgctagattttggagatgtctctgctctcagatctcatcaaccttaacctctccgataccaccgcgaaggtgatcgcagagtacatatggatcggtggatcaggaatggacctgaggagcaaagcaaggactctcccaggaccagttagcgacccttcagagcttcccaagtggacatatgatggttccagcacaggtcaagctcctggtg

SEQ ID NO: 25084 - DNA, 156 bp, Glycine max
  Clone ID: 701099884H1
ctgtcattgaagaaataaaagtgaagttctaattggtgttattgagcagatagcatggagccacagtgtagaatcaagaaggatgccactgaattgatagggaataccccaatggtatatctgaacaacattgtggatgggtgtgtagcccgtatt

SEQ ID NO: 25085 - DNA, 181 bp, Glycine max
  Clone ID: 701099885H1
ctcgagccgtcggctgcagctggtgaatcgactgtgttttactatacgatgaaaggagattattatcgttatcttgccgaatttaaggcaggcaatgagaagaaggaagctgctgatcagtctatgaaagcatatgagtctgctaccactgcagcagaggctgatttacctccaacacatc

SEQ ID NO: 25086 - DNA, 260 bp, Glycine max
  Clone ID: 701099886H1
gttttctggtcagagattctatgatgattggtttcagtcattatataatgttatcttcacagcacttcctgtaatcattgttggattatttgacaaggatgtcagttcatctctatccaagaaatatcctgaactatacatggaaggaataagaaatgttttcttcaaatggaaagttgtggccatatgggctttcttttctgtataccagtctctaatattcttctattttgtgagtactacaaatttaagtgctaaaa

SEQ ID NO: 25087 - DNA, 261 bp, Glycine max
  Clone ID: 701099887H1
tttctctatttttcctccgtttctattgcaatttctcaattactacatcgtattctgcaaattcaaactgggtcttggttttctgaaagatgggaggtggcaaggacaagcaccatgatgaatctgacaaaggaattttttcacagcttgctcatggggtagctggtgcagcacatggtggacatgggtacccacctggggcttacccaccaccacctggggcataccctccgcaccaagggtaccctccacaacatgggt

SEQ ID NO: 25088 - DNA, 234 bp, Glycine max
  Clone ID: 701099888H1
atagtttccaaaggcacgcagcgagtttaggcgcggcgggatcatcacgagattgcaaaatgaagttcaacattgcaaatcccaccactgggtgccagaagaagctggaaatcgatgacgacctgaagcttcgggcattttgggacaagaggatctcccaggaggtccttggtgacgccctgggtgaggagtttaaaggatatgttttcaaaatcactggtgggtgtgacaaac

SEQ ID NO: 25089 - DNA, 228 bp, Glycine max
  Clone ID: 701099889H1
ggagtttcctgttaatgttactgacaatgagttgatcaataaactttcttcagaaaatgaacatcttaaggaactgattaattcactggaaaagaaaactatacaggagtttcctgttaatgttactgacaatgaggtgagcagtaagctcattacagaaaatgaacatcttaaggatcaggttaattcattggacagcacaattgatgacgctgagaggaaatatga

SEQ ID NO: 25090 - DNA, 133 bp, Glycine max
  Clone ID: 701099891H1
tgccagtagtcatatgcttgtctcaaagattaagccattcatgtgtaagtatgaactaattcagactgtgaaactgcgaatggctcattaaatcagttatagtttgtttgatggtatcttctactcggataac

SEQ ID NO: 25091 - DNA, 262 bp, Glycine max
  Clone ID: 701099894H1
atcaccaccgcatcttttacctcccaccaaccgcaccaaagccatcatcctcctccgcctctaacatcaccaccacaacaacaagaacaagaagaaagagaagcaaggagagagagaagggttagaagggtgaagaagcatgtcttcactcaagaagaagaaaccctattacccgcttccgttaattcctatctagtactactactttacttctgattcaaaagggtgatcttcttcttcttccaagcttatcaattatcat

SEQ ID NO: 25092 - DNA, 262 bp, Glycine max
  Clone ID: 701099896H1
ggtttagcgaaggcgtgtaagccccaatttgcttcattatcagcaaaacgaaaaagtgcaatgggtgcagtttacttttctcaatcatgttacaaacctaggcaaattttcaatttggagagagaaagcactttggtgggaagatgtcctgttgttcagattagatgccggagggttgtgagtgcgtgtcttaacgtggatgttgatgcacctaatacagggactacaacatcggagaagaagaaaactaaggatgtgatcg

SEQ ID NO: 25093 - DNA, 298 bp, Glycine max
  Clone ID: 701099901H1
tgcagactcagcctgtggaggaattttaccgttcgagaggaaaattattggagtttaacctgcctggaggaatcccggaatcttggcctaagttgctacatgctcttaatcttgatgattacgaggacaaacgatctgctgcagcataaagatataataatgtatcataacagtaagtatttcattctttgcgtgcttatattgcatgcttggcaattttgcaggacagagaaccacagcaagggaacttctctgctagtattattttggaccaatgatgatatttgtaagtgttgta

SEQ ID NO: 25094 - DNA, 299 bp, Glycine max
  Clone ID: 701099902H1
attaacacacacaaacagaggctacgtacgatcaaattaattaagatggcggaagtgaggaacaaacaagtggttctgagggactatgtgagtggttttcctaaggaatccgacatgaacatagttgaaggaaccacaatattgaagcttccacaaggttccaatgatgtgcttctaaaaatctctacctttcctgtgacacttacatgagaatgctcatgaccaaggtggaaggcctcgacgtgtttggcacctatacacctggctcctcattaacagggtatggagtgtccaaagtc

SEQ ID NO: 25095 - DNA, 291 bp, Glycine max
  Clone ID: 701099903H1
cggctcgagttggagtccggacatgagagagagagagagatgagggaggtgtaagaaactggacggagtaggtgttgttggcattctgacctaaagcttgtgtctttctgcttcgtttgtatcttctgctgcgtaaagaggatccctttctgattcttccgtaaatttcgtctctgaaactagggctaatacttcatctaccgatctctatattctggtttttccagttcttggaaggaaaatgatgaaggtttgcttttgatccggcttgggagttttgatcgacttgat

SEQ ID NO: 25096 - DNA, 299 bp, Glycine max
  Clone ID: 701099905H1
aaacatttctcattcctttgaagcatgccggggttaacgtgcaacgcttgtaacaccgaattcaaagatgacacagagcaaaagctccattacaaatccgagtggcatcgatacaatctcaagcgcaaggtggctggggttcctggggtgactgaagctctatttctggctagacaatctgtgcttgctcaagagaaaaataaactgggtgaaactcccatgctctactgctgtggtctttgtggaaaggattataaaagttccaaggctcatgctgagcaccttaaatcacgtggtca

SEQ ID NO: 25097 - DNA, 298 bp, Glycine max
  Clone ID: 701099906H1
cgagccatttgggagttaggttctgcacgctctgcttccagcgagtgttctttcttcgtttcaacaccttaatttgcacacgctgcttcttcagcttgagaaatggcacaagaaacctttctattcacatctgaatctgtaaacgagggtcaccccgacaagctgtgcgaccagatctctgatgcagtgctcgatgcgtgccttgaacaggaccctgacagcaaggttgcctgtgagacatgcaccaagaccaacatggtcatggtctttggagagatcacaaccaaggccaacgtag

SEQ ID NO: 25098 - DNA, 295 bp, Glycine max
  Clone ID: 701099907H1
ctttgtgttcccaaaaggtttggtgcactatcagaagaacaatgcggataagcctgcttctgtgctttctgccttcaacagccaactccctggcacagtgtctatagctgcaactcttttcacttcaacaccaactgtgcctcataatgttctttctcaggccttccagattgatgctaaactggttgatgacatcaaggccaagcttgctcctaagaagacttaatttatgttgagcttatgatattccagagaggaagattatgataatagtttcataattaagactactttc

SEQ ID NO: 25099 - DNA, 286 bp, Glycine max
  Clone ID: 701099908H1
gatagcttgaggctcagatgtcgtattgctccatcaatatgcttgtcaccggcagctttaagtggaagtcaaggtgtgtatcctcttgtggttgctgctcatcctctagaacccaaccagtttgcggttgggttgacggatggatctgtcaaagtgatagaaccgaacgagtcagagggtaagtggggaacctgcccaccaacggacaatggaatattgaatggtagaacaggatcatcatctacaacaagcaaccacactgctgatcaggctcaaagataaacga

SEQ ID NO: 25100 - DNA, 149 bp, Glycine max
  Clone ID: 701099910H1
cccaccgacctcccggaccaacaaccccggttcgggttcggactcgcggtcggggtcggcggtgagattctcccggagacagtggaaaacatgctctcgatctgcgaccacgtgttcgtggacattcaggctctgattcgcaggttcga

SEQ ID NO: 25101 - DNA, 296 bp, Glycine max
  Clone ID: 701099911H1
ccacttttcactgaacacttattactcactccttcatggccacttcgctctctttctccatttctcccaaaaccactgccacaacctcagccttccgattcaaagtctccgccatggctaccaccatcgccgccccttctaccaaggtggctcccgccgtcattgtcggcggcggaagagtgggtagggccttgcaggacatgggcaccggtcaagacctcctcgttcgccgaggagagtccgtacctcccaattttgagggtcccatttttgtgtgaccaaggaccgatgatctt

SEQ ID NO: 25102 - DNA, 284 bp, Glycine max
  Clone ID: 701099912H1
gagacattgaaactgagctgtccactgctgctcttagtccacagccgtttggggtgccaggcattccttttaagcctggatgctcaagtgatattgccatcaatgatcctggggttttgaataatggcttgtgggctaatcagactcaacgaatgcgaacatatactaaggttcaaaaatgtggctctgttggaagatgtattgatgtcacccgttacaaggggtatgatgaactccggcatgatttggctcggatgtttgggattgaagggcagctagaagat

SEQ ID NO: 25103 - DNA, 151 bp, Glycine max
  Clone ID: 701099913H1
attttgaggaatcaatgaaatatgctcgaaggagtgttagcgatgctgacattcgcaagtaccaggcattcgcccaaacattacagcagtctagaggatttggaagtgagttcaggtttgcagattccacctccgccggtggtacagctgc

SEQ ID NO: 25104 - DNA, 294 bp, Glycine max
  Clone ID: 701099914H1
ctcggcgtcgccatggacgaagaagaggtgcgcaagatcttcagcaagttcgacaagaacggcgacggcaagatctcgtgcgcggagccgaaggagatgatggcggcgctgggatccaaaacgacgtcggacgaggtgaagcgcatgatggcggagctggaccggaacggcgacggctacattgatttgaaggagttcggcgagttccactgcggcggcggtggcgacgggagggagctccgggaggcgttcgagctgtacgatctggacaagaaaggctgatctcggcgaaga

SEQ ID NO: 25105 - DNA, 285 bp, Glycine max
  Clone ID: 701099916H1
cgccacctctggttgccgttgtaaatgcccaactctatgctgctgattatgctgacatggaggtaagcaaatacgacaaggagcgaagagtgtgggttaccattgggagactacctgagcgagcagtgtcgatgaatggttggggtcttgcattcagggcgtgcggagatatgcttattgtcatcggtggacccaggactcatggtgagggttttattgaactccattcatgggttcccagtgaaggactccacagtggaatctactcgccagaaacggtctggc

SEQ ID NO: 25106 - DNA, 209 bp, Glycine max
  Clone ID: 701099879H1
cctcagccatgtccttgcaaccaaacttggtgctcgcctcacagaggttaggaagaatggcacctgtgcttggttgaggccagatggtaagacacaagtaaccgtcgagtactacaatgacaatggtgccatggttccagttcgtgtccacactgtcctaatttccacccaacatgatgactctgtgagcaatgatcaaattgctgcgg

SEQ ID NO: 25107 - DNA, 265 bp, Glycine max
  Clone ID: 701099846H1
tttccctacctctcccttcaagatgcagatcttcgtcaagaccctcaccggcaagaccatcacccttgaggtggaaagctctgacaccatcgacaacgtcaaggccaagatccaggacaaggaaggaatccccccggaccagcaacgtctcattttcgccggaaagcaacttgaggacggccgtacccttgctgactacaacattcagaaggagagtactcttcacctcgtcctccgtctccgtggtggcatgcagatcttcgtt

SEQ ID NO: 25108 - DNA, 259 bp, Glycine max
  Clone ID: 701099847H1
tggtgatgttgttgtcaagaatcaggatttcatcgaggctacccgagaacgaagtctttcctttgtgttagctaagtttgatggattacttgggcttgggtttcaggagatctcagttgaaaatgctgtgccagtatggtacaatatggtgaagcaaaatcttgtaagcgaacaggtgttctctttttggctcaatggtgatccaaaagcgaaagatggtggtgaactaatttttggaggtattgatcctaaacacttc

SEQ ID NO: 25109 - DNA, 263 bp, Glycine max
  Clone ID: 701099848H1
caaattcttcccagtttgcttcaattgtttgttctagggttagggttttcgatccatttccccctcaaatttcaattattcacaagtgcagagcctgattttcctcccgtcgtgctttgaggaggccatgggaggtgacgccactgccgccgctgagagtgcgaccgcggagtcgaacgccgcaaatggagtcaacatcaacattcgctgctccaatggttccaagttttccgttcagattggccttgattccaccatcagat

SEQ ID NO: 25110 - DNA, 264 bp, Glycine max
  Clone ID: 701099855H1
ctctgtctctctgcttgcttcttgttgttgtaactaaggaacaagcgattgcttcttcttcccttttgttttcaaatttcaatttttcatcgggttctctgaaatggagagagatttcatgggtctcaactcaaaagaacctcttgctgtggtgaaggaggagatgcacgtttatggcttcgaagactctggcttcacaaagggtcggattgcacagtggccattctcgaacaaagtatctgcccttccacatttgatgtcttt

SEQ ID NO: 25111 - DNA, 267 bp, Glycine max
  Clone ID: 701099856H1
gtcgctgctcatcctccataacctccgagctctacaccgaagaacgaagccatggggaagacacatggaatgggagctgctcgcaagctcaagtctcaccgcaggaggcaaaggtgggctgataagtcatacaagaaatcccatcttgggaatgaatggaagaaaccttttgccggttcatcccatgccaagggaattgtccttgaaaagataggtcattgaagctaagcagcccaactctgctattcgtaagtgtgccagagttca

SEQ ID NO: 25112 - DNA, 247 bp, Glycine max
  Clone ID: 701099857H1
ccaaggtggaagaaaaaaaggttgaagagaagattgcagaaaagaaagattgaccatgtaactccatttcaagctctctttggttattattagtattttttttttttgcttttttcttctcaccgatattatataagcatgcacaacaaatttgtgcttctttgttcctataattaccactgccatgatgcattcctactactgttagtttgaaaatgtccaatgcctttgcaagtaacttcttaaa

SEQ ID NO: 25113 - DNA, 259 bp, Glycine max
  Clone ID: 701099858H1
cttaattgcctctagttctctcactttaactattttcacaaaccatagaaaaataataattttctctctcattgtaacatgtcttcctcagagggtgtctttgaacagggaattgagttctcagaagccaacaatgttcttctcatgtctctaatggaagaagaacaagaagaagagtactatggcgatgatagacttgtgagcatgattcaatcattggaggcagagatcactgacactgaaatgggtcacatgtatg

SEQ ID NO: 25114 - DNA, 134 bp, Glycine max
  Clone ID: 701099859H1
gctttctcaagcaacatgctgaagcatctggaaatcctctgtgggggcttggtggtcctcatgatgcacctacctatgaccagcccccatacaatggcttcttcaatgatggggcttcttgggagtccacatat

SEQ ID NO: 25115 - DNA, 133 bp, Glycine max
  Clone ID: 701099860H1
gcaccgtcgcaccttccctgaggcttctcttgtctgtcgcgagtgaccatggtgagggttagtgtgctgaacgatgctctgaagagcatgtacaatgctgagaacaggggaaagcgccaagtcatgattcggc

SEQ ID NO: 25116 - DNA, 217 bp, Glycine max
  Clone ID: 701099861H1
cgcaaatatgtttttcgtggacatgttgctgcctatatgaagatcttggcagaagatgaaacagagaaataccagtcacacttcagcgaatacatcaaacgtgggatagaggctgatggtattgaggcactttacaagaaggttcatgctgccatccgtgctgatcctactctcaggaaatctgataaggagcccccgaaggagcacaagaggtaca

SEQ ID NO: 25117 - DNA, 260 bp, Glycine max
  Clone ID: 701099862H1
ctcgagccgatcaagtaatcattcacacaattcctaccctactgtcccaccagttgaccattctagcacggtggatctttctggtcagacttctgttacattgacaagggcttggagccaaatgaacatatctccagctaatggaagggtgttattatcagatacaggtgcttttggtcttgaaacaagtcacttccttgttggaagtggtgctactgctagcaatgctgcttctgtagatgttgggggattccatcatg

SEQ ID NO: 25118 - DNA, 252 bp, Glycine max
  Clone ID: 701099863H1
aagcaacgaggcttccatggttaagtcccttgtagcagacaggctctctttattagttcaaaccacttctgctgtcatcattgcaatgatcataggccttgctgtggcttggaagctagctcttgttatgatagcagtgcaaccactcacaatcctttgcttttatacaagacaagtgttgctctctacactctcaacaaaatttgttaaggcacagaatcaagttccccaattgccatggaggcagtttat

SEQ ID NO: 25119 - DNA, 262 bp, Glycine max
  Clone ID: 701099864H1
gaggagttgcggttaaggatccatctgctccccatggagttcggcttttgattgaggactatccttatgcttctgatgggctagagatatgggatgccatcaagtcctgggtgcatgaatatgtctcattctactacaagtcagatgcagcaattcaacaagatcccgagctccaagcttggtggaaagaacttgtccaagtgggtcatggtgatttgacagataagccatggtggcaaaagatgcaaactcgtgaagagtt

SEQ ID NO: 25120 - DNA, 218 bp, Glycine max
  Clone ID: 701099865H1
cggctcgaggggacttggcttgtttttctcttttatccacttggtaacttcggctattgtcgaatccgtaaggcgacggagagcaatcaaggagggatatcttaacaatgccaatggtgtgttgcatatgtctgcaatgtggcttttcccacaactttgcttgggtggaatagctgaagcattcaatgcattaggccaaaatgagttctattacacag

SEQ ID NO: 25121 - DNA, 261 bp, Glycine max
  Clone ID: 701099866H1
cgggctatttaagccctttgattcggttttgacaaatctgttggtcttcagtatctggcatatcattgaactccttttgggattggaacttgatatgatcatttgtattggggagtaagaccttgttacttttgcaaatgctaaattttaataggatcagaagtcagcccaggacaaccagatctatgtctttgggaggcatggattacgtggatccaaaaaggaaaggcaattttgttggaaaagtttttcttgctgcag

SEQ ID NO: 25122 - DNA, 241 bp, Glycine max
  Clone ID: 701099867H1
aaaatataacaaataatttgtactttcatcaaaacaaaatcccgttgtatttttctcagatggctcgaacgaagcaaacggcccgcaagtccaccggcggcaaggcgccgcggaagcagctggcgactaaggcggctcgcaagtcggctccggcgaccggcggcgtgaagaagccgcacagattcaggccgggaaccgtggcgctgcgcgagatccggaagtatcagaagagcacggagct

SEQ ID NO: 25123 - DNA, 266 bp, Glycine max
  Clone ID: 701099868H1
ctatcgagccgaatcggctcgagcgtgcatgattacagagacagagattataggagaagaagtcgcagcagaagttatgataggtatgaacgtgacaggcatcgtgggagagacaaagattatcgtcgcagaagtaggagccgtagtgccagtcttgattacaagggtcgtggtagaggacgctatgatgatgagcgtacatagtagaagccggagcagatcagttgatagccgctcccctgcacgacgcagtctagtcctcgaag

SEQ ID NO: 25124 - DNA, 264 bp, Glycine max
  Clone ID: 701099869H1
atagttttctcacaaaggaggaagaatggcatctttcatttcactctctttgttgcttctctttctcaattaccccttcctttccctctcaaccaaccctgaagaatggcatccaacaggggtcaaggtggaattcagcagttgttggctgctgaacaagaggcacaacggattgtgaatgctgcaaaaaatgaaaaattggctaggttgaaacaggccaaggacgaggctgaaaaggagattgctgaataccgagctcaacta

SEQ ID NO: 25125 - DNA, 219 bp, Glycine max
  Clone ID: 701099870H1
ctcgagccgtttggagtgtgtgtgcacccattgatgacaagcaaccccattgcatggaagcctaagaggaggagaagacgaagaggacaagggtaactgaatcgccgcttctgcagcttcgttctttcgtttttgtttcatctttttagcttcagagggtaaataaaaaatggaggttttggtgggtcccgctttcaccatcgacgttcctcgtctcgc

SEQ ID NO: 25126 - DNA, 256 bp, Glycine max
  Clone ID: 701099871H1
cttccctcgagcccaaaaccgcgtcgttcactcacaacgacggccgttccgtcaacctcctccaggacgacggcaccatccccatgacgttccaaggcgtcacctacatcatccccgtcgtcatctggctcatggagtcctaccctcgccacccgccctgcgtctacgtcaatcccacgcgcgacatgatcatcaagcgccctcatcctcacgttaacccttctggcttggtttccgtcccttacttgcagaattg

SEQ ID NO: 25127 - DNA, 260 bp, Glycine max
  Clone ID: 701099872H1
cggctcgagctcatcacatctcgcgaatccaagccgaaggggaagggggtttgataaaggttgacattgaaatttgaagccatggttcttgactccattctgacatctcctcgtctcaagtctccatctttcaggagacagtttaaaaaggatgaactgggtagttggtccacacttttccagaggcatcgcttcctcttatctgctcttgttctgctaactctcctctgcactgtttcatctttactttgctgtcactt

SEQ ID NO: 25128 - DNA, 259 bp, Glycine max
  Clone ID: 701099873H1
aagcgagaagcgagaagcgacatggatccagacgcgttggcaaaggcattcgtggagcactactactccaccttcgacaccaaccgcaacaatctcgccaatctctaccaggaaggttccatgctctctttcgagggtcagaagatccagggctcccacaacatcgtcgccaaactcacctcccttcccttccaacagtgccagcactccatcaccaccgtcgattctcagccctcaggcgtcaaacgcgccatgctcg

SEQ ID NO: 25129 - DNA, 240 bp, Glycine max
  Clone ID: 701099875H1
ctcgagccgctcgagccgaaaaaataaaacaacacataataagcaagcaaaacacacacaaagggaaataacatatattatacacaaaccaaaccatatatcttattctattttctccctctccaccactccccttctttctcctcctcctcaaccttaatcatggagaatattggagaagagtacaagcattactgggagaccaacatgttcctccaaacccaagaacttgacagttgg

SEQ ID NO: 25130 - DNA, 132 bp, Glycine max
  Clone ID: 701099876H1
gcgggatggaagtggaggcagtgcaacaacagcgcaaaggagcgcacctgaagaagagggctctgaagaacaaagctttgggcatcactttcaacgagaaagatctcactgactacgtcaccggctttcaca

SEQ ID NO: 25131 - DNA, 165 bp, Glycine max
  Clone ID: 701099877H1
ctcttgcttcttgcttctattacttgcttctttcttcaccatgtcacttgctgggaaaatcaccactgaaattggggttcatgcaaccgctgcaaagtggttcaacctctttgcaacacaacttcatcatgttcaaaaccttactgatagagtacatggaaccaa

SEQ ID NO: 25132 - DNA, 145 bp, Glycine max
  Clone ID: 701099844H1
ctaccctctaagaagcagtggtggtggcatttgcaagcgatcaatcagcttgagtagaagctctctagctcttgcagttgccatgaacaactctgacagcagtagtagtatcacaagcgaagattctggttccagctcgaattcg

SEQ ID NO: 25133 - DNA, 256 bp, Glycine max
  Clone ID: 701099878H1
ttggaattcaactcttctctttctctttctcttctcttctgtcgaagaagaagaagcagaagtagttacagaaccatgctggagaatcttcaggctcctccgccaacggaatcggccccagtggtgaagcgctatgctcctcccaaccagaggaaccgttctgccaacaggcgcaaatcatctgatcggcttgatcggacaaacagtatcgggaatgacttagaaaagaatcaagttgcttattcaagagtgttca

SEQ ID NO: 25134 - DNA, 245 bp, Glycine max
  Clone ID: 701099810H1
cttacaagttacatccattgagaaacatgaaggtctcccccttagcattttcaatcctttttttgtccttcaccatagaactcttcattggcattgcttcagcagcacaagaaccagtgcttgacacctcaggccagaagctgagaacaggtgtcaagtactacattctaccagtcttcagaggcagaggtggaggcctaacagtttcaagcagtggcaacaacacatgccccctctttgtggtg

SEQ ID NO: 25135 - DNA, 202 bp, Glycine max
  unsure at all n locations
  Clone ID: 701099811H1
ttgctctctaagctttgattcttcttaattcatacccttcccacacaccataaaacataagaaactggtantctgcctgacatggagtacatgaaccagagactacaatatgattgccttctttttgatttagatgatactttgtatccacaacgtcctggtcttgcacaagcatgtggccaaaacattacagcctatatgg

SEQ ID NO: 25136 - DNA, 146 bp, Glycine max
  Clone ID: 701099812H1
gaaacagcgaaagtgaaataccactacttttaacgttattttacttattccgtgaatcggaagcggggcactgcccctctttttggacccaaggtcggcttcggccggtcgatccgggcggaagacattgtcaggtggggattttg

SEQ ID NO: 25137 - DNA, 185 bp, Glycine max
  Clone ID: 701099813H1
ctttgttcactcttcttctcttgcggctagggttttagcgcagttcttctagatttaaggaagatgggtaaggaaaaggttcacatcagtattgtggtcattggccatgtcgactctgggaaatccactaccactggtcacctgatttacaagcttggaggcattgacaagcgtgttattgagca

SEQ ID NO: 25138 - DNA, 210 bp, Glycine max
  Clone ID: 701099814H1
ggctgagctatattatgctggaagctatggcatggatattcaagggccaacaagagactgcaaatacagcaaagacaaaggagagccagttctttttcaacctgccagtgaatttcttcccatgattgatgaggtgcaccatcaattagttgagaaaatgaaatcaattcctggagccaaggtggagaacaataagttctgctgttctgt

SEQ ID NO: 25139 - DNA, 214 bp, Glycine max
  Clone ID: 701099816H1
aactaatttacatatacttatacttcaacaagtataacaatgaagacaattaattcattgtttggcctcttgttccttctcctaattgcatttaccatgaagcctgccgttgctagtggtgttcatgacacagatgatcgcatgttagaaaatggagcgtgactacttcatcttacctagttttgatgacgagggtggtggagttacacttgct

SEQ ID NO: 25140 - DNA, 257 bp, Glycine max
  Clone ID: 701099817H1
acgcgaacgcaggcattcggctcgagaatttaacagttttagggcacaaattggcaatgcttcctgtggagcccaaacttggcaagatgctcattttgggagcaatcttcaagtgtttggatcccataatgacagttgttgctggtcttagtgtaagagctccatttgtgatgccgtctgacaagaaggatcttgcagagtctgccaaagcccaattagctgctcgtggctatagtgatcatctggcactcatccgg

SEQ ID NO: 25141 - DNA, 246 bp, Glycine max
  Clone ID: 701099818H1
gcgccacctcccagtttgccgccgtccctctcaacctctgctcctcccccgactccgccgtcgactacgtcgtcaccggctcctggagcgacaaggccgccaaggaggcgcagaagtactgcaagcccaccgtgatctggtctgggaaacccgaaaagtacacaaagatcccatcttttcacgatttggagcagaacaacaattctgggtatcttcatatctgtgccatgagcacctccatggggt

SEQ ID NO: 25142 - DNA, 264 bp, Glycine max
  Clone ID: 701099819H1
aaaaaataaacatatattgagaatggagggttgtgtgaagaagttgctatgccttgttgggtttgtggtgcttgtgagtactattggtggggtggagagtgctggtgaatgtgggaaatctacaacccctgataatgaggcttataagcttgcaccatgtgcctcagcagcacaagatgagaatgctagtgtttctcagagttgctgtgctcaggtgaagaaaattgggcagaaccctagttgcctctgtgcagttcttctctc

SEQ ID NO: 25143 - DNA, 265 bp, Glycine max
  Clone ID: 701099820H1
agagtcctggatgaagacacaggtgaagagctggacagcctaggcaaacttgcaccaacggtggagaaagtaaagcatggatttggcatgaacagcacctagagcagctacataagctaaatgtataaaaaaagattctgcgacaggttggagaaggtgaattttgctccttccttctgattcggtatcgttatttgggacccctgataatggaacaagctggaaatatttgcaagattacttgaacttcttccattgtatgacc

SEQ ID NO: 25144 - DNA, 278 bp, Glycine max
  Clone ID: 701099821H1
tccctcgagctcgagccgctcgagccgcccaagcccaagttgtctttcctgattgtcatcctcagtctctctgcctccgtcggcgcccgccccttcgtccttatcctctcccaggaagactacaaggacgacccccccgccgatcccgactcgcccgccgagtgggatgagttcgcccacggagacgcccacaaatccgaggaggacctcgaccccggctcatggcgccccatcttcgagcctcccgccggagatccccaacccctccccgaatccga

SEQ ID NO: 25145 - DNA, 204 bp, Glycine max
  Clone ID: 701099822H1
atctgtatgaccccatggctgctgctactgctactgcggacagcgtgtcctcgcaggcatacctctcaggaaacgcatgcaggaaacgagaattctgatatcagaactctgtcgccacttctattctctcggatgggtctctggaactggtggcagcatcaccatcaaagtccacgatgactctatttccagaccccaccaact

SEQ ID NO: 25146 - DNA, 263 bp, Glycine max
  Clone ID: 701099823H1
taaaaaataaacatatattgagaatggagggttgtgtgaagaagttgctatgccttgttgggtttgtggtgcttgtgagtactattggtggggtggagagtgctggtgaatgtgggaaatctacaacccctgataatgaggcttataagcttgcaccatgtgcctcagcagcacaagatgagaatgctagtgtttctcagagttgctgtgctcaggtgaagaaaattgggcagaaccctagttgcctctgtgcagttcttctc

SEQ ID NO: 25147 - DNA, 266 bp, Glycine max
  Clone ID: 701099824H1
atcaccctcgcgccctcgctcttcccttcctggtggcgacaatgtcgactcctgctaggaagaggctgatgagagacttcaagaggctgcaacaagacccgcctgcagggatcagcggtgccccccaggataacaacataatgctgtggaatgctgtcatatttggtcctgatgatactccatgggatggaggcacgttcaagttgactctccagtttactgaggattatccaaataaaccaccaactgtgcgatttgtgtctcgc

SEQ ID NO: 25148 - DNA, 264 bp, Glycine max
  Clone ID: 701099825H1
gcgtgacatcgattccaaaggtgcgtttctgctgtgctagggtttctgcatcttccacctccgtcgcgatgaaaccaggcttcatctgattccgatttcccttcgctccttctcctccttaacattcatcttcttcgattcctctacaaattatgattattattatgatgaactccatcttcgcctcgcataaccttcgcgtcttcggtcccggcttgaatcccttcgcaccttattgcatcgccaatcactccttttccttcc

SEQ ID NO: 25149 - DNA, 242 bp, Glycine max
  Clone ID: 701099826H1
ctctctctctctctctctctcttcgttcttttggagtgtgtgtgcacccattgatgacaagcaaccccattgcatggaagcctaagaggaggagaagacgaagaggacaagggtaactgaatcgccgcttctgcagcttcgttctttcgtttttgtttcatctttttagcttcagagggtaaataaaaaatggaggttttggtgggtcccgctttcaccatcgacgttcctcgtctccgcgc

SEQ ID NO: 25150 - DNA, 210 bp, Glycine max
  Clone ID: 701099828H1
ccaatcctgacacggggaggtagtgacaataaataacaataccgggctcattgagtctggtaattggaatgagtacaatctaaatcccttaacgaggatccattggagggcaagtctggtgccagcagccgcggtaattccagctccaatagcgtatatttagttgttgcagtcaaaactcgtattggacttgggtgggcgatcggtcgc

SEQ ID NO: 25151 - DNA, 221 bp, Glycine max
  Clone ID: 701099829H1
gccaaatcattcccacaactagagtgtacggtgtttgatcttccacatgttgttgccactttacaaggaagtgagaacttgaaatatgttggaggggacatgtttgagtcaattccttctgctgatgccattctcttgaagtggatattgcatgactggacatgatgagcagtgtgtgaacatactgaagaaatgcacagaggcaataaagagccaggtga

SEQ ID NO: 25152 - DNA, 211 bp, Glycine max
  Clone ID: 701099831H1
ggcgaaatcggcgtcgaattctctgatgcagagcctgaagcggttcataaagaagccatgggagatcacgggcccgtgcgcggaccctgagtacaaatccgcattgcccttggccgtggagtaccgcctcagctgccccgccaccgtcaaggagaagcccatcatccccaactccctcccggagaccgtctacgacatcaagtacttcacc

SEQ ID NO: 25153 - DNA, 266 bp, Glycine max
  Clone ID: 701099832H1
gacaaatggagttgttcttctacgcggtgttcggcggtttgggagcggttgttgcagtgacggagctgagcaagagcaacaaggaccgaatcaacacctcttccgcattcaattccttctagaacaactacctcatcgtctattccctcatgatggctggagattggctacaaggtccatatgtctactacctttacagtacatatggatatgggaagggagacataggacaactcttcattgctggttttgggtcttccatgctc

SEQ ID NO: 25154 - DNA, 254 bp, Glycine max
  Clone ID: 701099836H1
ctcgaccccagaagtggtttctgcagctccaattcaatcttctacagcaagcgtaaccgcctcccactccctcccaacaacgccccccccgtcaccaccttcatctcctcccgcgcccaccgcgccaccacagccttcgtcgacgccgccaccgcccgccgcctcacctacacccagctatggcgttccgtggagggcgtggcagcctctctctccgtggacatggggatccgccagggcaacgtggtcctcat

SEQ ID NO: 25155 - DNA, 216 bp, Glycine max
  Clone ID: 701099838H1
ctcgagccgctcactcacaaacacacactgaactaaaaaacatcaaaagagacatggctgagcaaaccttcatcatgatcaagcctgatggcgtccaaagaggccttattggcgagatcattagcagatttgagaagaaaggtttctacttgaaaggtttgaaacttgttactgtggaccgtccttttgctgagaagcactatgctgatttgtctg

SEQ ID NO: 25156 - DNA, 254 bp, Glycine max
  Clone ID: 701099841H1
gtcctcttttgtgtttttctgcagatgtctcggtgggtagtagttgatgttcttgttcttgttcttgattcgtgaaagaagaactgaaagcatgaagctctccttctccgtcccatcatccaaaccccactcgaagcccaaagccgtctccaacaccttcgacgacaattccacctcccaaaacgactccggcggaaccaaatacctcatcaccgaattcgacccttccaaacccgctccacctccgtccccaa

SEQ ID NO: 25157 - DNA, 220 bp, Glycine max
  Clone ID: 701099842H1
attaaagataagattatattgctaagaagacaaaatatgaaggttgtctacttgcttgttgccctcttggctttgacatcaactgttgtctctgcctatgaccctagtcctctgcaagatttttgtgtggcagccaaagaaaaagatggtgtatttgtgaacgggaaattctgcaaggaccccaagcttgtcaaagcagaagatttcttcagacatgtgg

SEQ ID NO: 25158 - DNA, 267 bp, Glycine max
  Clone ID: 701099809H1
gaaaattaatctccctttcattttctctgcatctgtactctccaaaatgccgtccttagaggaggagctcttcccttcaaccccaggcaagttcaagatcgagcgggcccaccacatgaaccgccagctctaccgctgcttcgcctccaccagcaccatgttcctgtgggccctctttttaatcgccctcaccgcttcatatctcagcttccaaggcttcgttgattccggcagccgctacctctccgcctcctggggcgggatcca

SEQ ID NO: 25159 - DNA, 280 bp, Glycine max
  Clone ID: 701099779H1
actcgagccgaatcggctcgaggtttatcggaacgttgctataaacgctgttgttttcagatacacacgtgactcactatctatctatcaatcgatatctccgagttcagccgaaccaaactccgaagctatggcagagctccaaaccaaggttgaacctgttacggtcccggctccggtggatcccgagccaccgctagctgaggctccgccgctcgagaagaaagcggtggcggtgccaccacctgttccggctgcggcagaggaaaccaaagctctt

SEQ ID NO: 25160 - DNA, 276 bp, Glycine max
  Clone ID: 701099781H1
cggaggtaaaaaaatacgacaaggagcgaagagtgtgggttaccattgggagactacctgagcgagcagtgtcaatgaatggttggggtcttgccttcagggcatgtggagatatgcttattgtcatcagtggaccaaggactcatggtgagggttttattgaactcaattcatgggtgcccagtgaaggacctccacagtggaatctactcgccagaaaacggtctggcaactttgtctataattgtgctgtgatgggatgttgaagaattgaat

SEQ ID NO: 25161 - DNA, 276 bp, Glycine max
  Clone ID: 701099782H1
cggctcgagcaaacattcaacactcacttgttgctctattcgtaattcagacctcaaactatctcagactcagagacttgtccatcacttcaatcccaaaactcccatagaggaagccgttactcccccaacatcatggtacactcatccctctttcttccaccttgagctcgatcttgtcttctacagaggctggcaagttgtgggatccacagagcagataaaggatccccgtgactatttcactggaagactaggagatgtggaatatgtggt

SEQ ID NO: 25162 - DNA, 274 bp, Glycine max
  Clone ID: 701099783H1
ttctgaatggctttttcaagagttgcattgttaatatgcacggtaattgggtattttgtgcttgcctctgcgggcaatttttaccaagattttgatatcacttggggagatgggcgtgctaagatactcaacaatggcgagcttctcactctgtctcttgacaaagcctctggctcgggtttccaatccaagaacgaatacctttttggtaaaattgatatgcaactcaaactagttccaggcaactctgctggcaccgtcacagcctactact

SEQ ID NO: 25163 - DNA, 274 bp, Glycine max
  Clone ID: 701099784H1
gtgagatttgcgaatctgagaaatggcggattcttctcgggaggagaacgtttacatggcgaaattggcggagaggccgagcgttacgaggagatggttgagttcatggagaaggttgcaaagactgtggaggttgaggagttgacggtggaggagaggaatctcctctctgtggcttacaagaacgtgattggtgcgaggagggcttcgtggaggatcatatcctccattgagcagaaggaggagagcaggggcaatgaggaccacgtggcca

SEQ ID NO: 25164 - DNA, 276 bp, Glycine max
  Clone ID: 701099786H1
cttccgcgctaattttagggtctgagcaatctggttggtagaacctcttggtcttagagagtcaagttttatgtctggattagacgatcaaattcctactgccttcgatccttttgctgatgcaaatgctgatgactcgggtgctgggtcaaaggagtatgtgcatattcgcgttcagcagcgaaatggtaggaaaagcctgacaaccgttcagggattgaaaaaagaattcagctataacaagatacttaaagacgttaagaaagagttctgttg

SEQ ID NO: 25165 - DNA, 275 bp, Glycine max
  Clone ID: 701099787H1
aggagatggaactcagaagggtgcatctgcaatttttgaggaagtcagaaggcgtggtctcaaagtttcagttgtaggtatccccaaaaccatagataatgatatcccggttactgataagtcctttggctttgacactgctgttgaggaggctcaacgagctataaatgcagcacatgttgaagctgaaagtgttgaaaatggcataggtgttgtcaagttgatgggtagaaacagcggatttattgcaatgtatgctacacttgcaagtcgag

SEQ ID NO: 25166 - DNA, 278 bp, Glycine max
  Clone ID: 701099788H1
ctcgagccggtggaaaacatggctgagacaagtaagaatggagctagtactggttgtgctcaggaacttctaggaggtgaagaggaggaagagagatctgtggcatcggtggaaaatcaacttcgtaaggaaatgactgtatatgagaaatttatcctggggatgctcacaaactttggtagcatggcattagaccgaattcacaatactctcaagatgttttgcattgccgatcccccatatgacaagtcactccagcaactacaaagctttttgtc

SEQ ID NO: 25167 - DNA, 273 bp, Glycine max
  Clone ID: 701099789H1
gaaatgtgatgttgatattagaaaggatctgtatggaaacatcgtgcttagtggagggtctactatgtttccgggaattgctgatcgtatgagcaaggaaattggtgctcttgcacccagcagcatgaaaatcaaggtggttgcacctcctgagagaaagtacagtgtctggattggtggctctatcttggcatcacttagcaccttccaacagatgtggatctctaagggcgaatatgatgaatctgggccagctatcgttcatcggaagtg

SEQ ID NO: 25168 - DNA, 274 bp, Glycine max
  unsure at all n locations
  Clone ID: 701099790H1
ctctattagtctgcatgctctgcaaactgagcatggctcctctcgcattttccttcttcttcatccttatcacattcttttcttcatcatctgaagcgggatccgttggaataaactatggaagggttgcgaacgatctacctacaccagcccgagttgtggagcttctgaaggcacaaggtctgaaccgtgtgaagctctacgacaccgacgccaccgtcttaaccgcgtttgcaactcgagatnccaaggtcgtagttgccatgccaaacga

SEQ ID NO: 25169 - DNA, 276 bp, Glycine max
  Clone ID: 701099792H1
atttttagttcaagtaataatggtggtactgtaggtgggaagccagaatgcgagtcaaggcagcaggataactcattgcatggttccttggtggttcctcgggtggaagataaatcagcttctgtatctgatgtcacttctggtaggggcctggttgagtcttctactaataccaatagggctagaagtagaacagagaaggagccagttggtaggtacaggcaaaacaatagggtggctatatttcgggaccgtgaggttgaccgcaaagatcct

SEQ ID NO: 25170 - DNA, 278 bp, Glycine max
  Clone ID: 701099793H1
aaacctcttctttcaggtccaattcactcgcttattcttttctttccatacacatgcagacaccaagttcgaacaagttcaggactggcatggacttctttcaccgcgcgaaggcggtgcgcctccgcagccaccacgacaagtacctcctcgcgtgaggacgacgaggattcggtgacgcaggaccgcaaaggctcctcgaaaagcgcgcggtggacggtagaatacgtggctgaatacgataacataattcgcctgaagagctgttacggcaagta

SEQ ID NO: 25171 - DNA, 279 bp, Glycine max
  Clone ID: 701099794H1
attctcttcaacctaacgcagcatcgctatactcttcattccatggctttgcccaatcagcaaaccgtggattaccctagtttcaaactcgttatcgtcggtgatggtggcacaggaaagacaacctttgtgaaaaggcatctcaccggagaattcgagaagaaatatgagccaaccatcggtgtggaggttcacccattggattttttcacaaactgtggaaagattcgattctactgctgggatactgctggacaggagaatttggtggcctcagag

SEQ ID NO: 25172 - DNA, 280 bp, Glycine max
  Clone ID: 701099795H1
gttgggaatcgatgattttgatatggaagaagaggtgagacccgatttcccttgcccctattgttatgaagactttgacatcgcgtctttgtgttctcatcttgaagatgaacattcttgtgaatcaagagtcacgatttgtcctatatgctccgataaagttgcacggaacatgttaagtcacataacgctgcaacatgggcatttattaaagttacagagaaggcgcaggttaagaagagttgctattccaaacagtcagacattgtcccttttgggt

SEQ ID NO: 25173 - DNA, 279 bp, Glycine max
  Clone ID: 701099796H1
ctcgagccgttccttcccaattgggttgcttctcatacacacgctcacttaccattttgtctattcccattatgattctatagccttttaatgttttttttatcgataaatgttaattttactaatttttgtttgtaagatatttaaacccgtcacatctctccttttctctggcctcttatataaccttgactttgttccctttcgtttagcaaacactaagttattatggattcgaattcgcgttaccatgttcagcagcaacaccaacaacccaat

SEQ ID NO: 25174 - DNA, 238 bp, Glycine max
  Clone ID: 701099801H1
attcatcagttataattgataagctgggacataagattctgtccaagaaaattgtagattcaacttctgaggacgaagagacaaaatggcggcggtgggttgataatcatttggtacatgttctgtcaccaaacatatatcgaaatacatctgaagcacttgaatcctttgagtatattacgagcaacggcaatttcagctatcttgaaaaattttcggtgaagtatgctggagctgc

SEQ ID NO: 25175 - DNA, 266 bp, Glycine max
  Clone ID: 701099802H1
ctcattcacaatcccaaattcccaattctctcttccttctccacaccaattgacacctccctaacccccaaattctccttcagcgattcatctctcttgaatcgaatcgatggcacggatgggcccagggttccgattccaccccaccgacgacctgctggtggtgttctacctgaagcgcaagatgaccggaaacctctcccgctacgaccacatcgccgttgtcgacgtctacaagctcgagccctgggaccttccccctctgt

SEQ ID NO: 25176 - DNA, 267 bp, Glycine max
  Clone ID: 701099803H1
gagagagagagcgagcagtttcagacacagagagaggggtttgggattggagggattgacgctgcgtctcttcctcttctctttcgatccatccctcattcctaatcctccaatccaaccacctcagcctcacactcacatatacacatatctgaacgcgtatcgtccctcctatggcttcaaagcgcatcctcaaggagctcaaggacttgcagaaagacccaccaacttcttgcagcgctggtccagtagctgaggacatgttcc

SEQ ID NO: 25177 - DNA, 260 bp, Glycine max
  Clone ID: 701099804H1
ggaatgcagagaaatgagaattgggcattggctcagtccttctgaggcaggtggcgctgccaaacgcagaacctccggcagaaattgccaccgcaaacacgtggaagacgggtagtagtactccatctcccattctctcatattccctttactaattaaagatcatgaacagcgagagacagtcgacgacgacgacgttgctgcacggcaagtacgagctaggtcgtgtgctggggcacggaagcttcgccagggtctac

SEQ ID NO: 25178 - DNA, 230 bp, Glycine max
  Clone ID: 701099805H1
tggaatgcttgtggatattttccttcagatctcagaatatggagggtagacgagacacaaaataactctatattcttaactgatgtgctgaatgggcagtgttcaaaaaatgtgtcattgccaaacaacagccaacagctgtctttgggaaccaatagtacattggaaaatacagacaatagtcaggatggtggtgagaatgagaacaaggcggcagggatggaattctg

SEQ ID NO: 25179 - DNA, 215 bp, Glycine max
  Clone ID: 701099806H1
aggcaacaaaattgatgatgacgatgaagacgaaaacaacaacgattacagctttgcgttttacgtgaatcgcgatcaatcagacaagtcgtctcgctccgccgaagagctcttcgacggtggcaaaatcaagcccttgaacgagtcatcacgtgcgacttctgttgctgaacaaaaaagaggcagagaaagagagagaagttcttcttcaacac

SEQ ID NO: 25180 - DNA, 267 bp, Glycine max
  Clone ID: 701099807H1
ctagattcaagatgccaaggattgaggctaatcattcccttttggaagaaattagggaggttaatcagcgacttattgacacggtagtagacataagtaatgaagaagttgatccaacagcagctgctgctgctgctgaagggacagaagggaccattgtcaaatgctcttacaatgctgtggctctcggtccgagcttaaaatcccaatatgcttcagcacagatgtcaccaattcaacccttgcacttgcttgttcctacaaatt

SEQ ID NO: 25181 - DNA, 255 bp, Glycine max
  Clone ID: 701099808H1
ctcgagccgcataaacataaatagtactaaatccttgtgttgtgttctaagtcctcaatccaacttttcagctatctatcttgaaagaagaagaaatgggatccaacggaacatcttgggctgaccagtgggataacgggcctgacccagtgactgtctccaatgaatcaaagaaaaagaacaacaaggccttcggcaagaccaaggcagttgcttccaccggcgtgaagaagttgaaggagggtactctgttgg

SEQ ID NO: 25182 - DNA, 282 bp, Glycine max
  Clone ID: 701099778H1
agaagaagtaggaggaagaaaaggggaaaacgcaaagaaaaaaagaggaagatagatcaagatctcccttgcgtttgtctcagttgaagaaattcaagagcagaacgagactaactcaacggtatcagacgtttcagggtttcagcacttccattttttttttttccggctttgagttggaagaagatcaaagagatgtctgttgtgtttgacatgagttttgatgtccaattcagttttgttcatgttgatgctatctgtacgtaggttcctagttgcttg

SEQ ID NO: 25183 - DNA, 275 bp, Glycine max
  Clone ID: 701099753H1
ctcttttaaccaggccgtcggcgccaccactcccttcttcaccgccgttttcgcttacgtcatgaccttcaagcgcgaggcctggctcacctatctcaccctcgtccccgtcgtcaccggcgtcgtcattgccagcgggggtgagccgagcttccatttatttgggttcatagtatgcattgcagctactgccgcacgtgccttaaaatccgtgttacaaggaattttgctttcttctgaaggagagaagttgtattctatgaaccttcttcttt

SEQ ID NO: 25184 - DNA, 277 bp, Glycine max
  Clone ID: 701099754H1
atttttcagtattttgttatggatgattttcgtggtcctccccaccttcagggtccttcccccaccctcagggtgaacgtaacgcttgggcctcaggtggacagaatgatgatatctggactgcacaccgttgaagacatattttgttgcagctgtggacaacctcttggatggaaatatgttctgacacatgaaaagaatgaaatatacaaagaagggaagtttgtgcttgagaggtggacgatagttgacaatgaagaggaggaattgaattctg

SEQ ID NO: 25185 - DNA, 274 bp, Glycine max
  Clone ID: 701099755H1
caacgatgctgctggactacaactttcaagaaagatgagaaagagtgtgttttggttcttctgtatcaaagtggagacattgaattaaggtccttgccagctttggaagtgttgggagaaagctctttaatgtcgatcctcagatggaacttggaaaccaacatggtgaagacgatatgttcttcatcaaatggaaaaattattctggtcaacgggaatgaaactgcttgcatatcactgttgaactgtgaaaatgagttctggactccagagt

SEQ ID NO: 25186 - DNA, 280 bp, Glycine max
  Clone ID: 701099756H1
cggctcgagccgccctttttttttttttttattattccattttccccctctagtagtcagtgctacgaagctgctcgtgggtgtggctgatgaagaaaacctcgtagataagcccagcaattccacctccgatgagagggccggcccattagatccagtggttggtcaaggtcaagttcacgaaagcaggcccaaatttcaaagcagggttaatggttgctccggaaaaggccccacccaaaaaaatgttagcgccaaaaatgaaaccaatggcgatggg

SEQ ID NO: 25187 - DNA, 278 bp, Glycine max
  Clone ID: 701099757H1
gagaacctgcttggccttttgagggttcgcgtgaagcgtggtgtcaaccttgccgttcgtgatgttcgaagcagcgacccctatgttgtcatcaagatgtaccgccagaaactaaagactcgtgtgattaaaaaggatgtgaatcctgagtggaatgaagaccttactctttctgttataaatccgaatcacaaagttaaactgactgtgtatgatcatgacacttttagcaaagatgacaaaatgggagatgcagaatttgacatcttgccctttat

SEQ ID NO: 25188 - DNA, 276 bp, Glycine max
  Clone ID: 701099758H1
aaacagcagtgatagagctccaaaatagattgaaagcaagtaccatggaggtaaagatcttcaatctaaaggttaagaccttacagtctgagaattggagattgaaggaacaggttgctggtcatgcaaaagtgctggctgagctggagactgccaaagcgcaagtcaaattgctcaataagaaaattaggcacgaagctgaacataatagggagcagatcataactcttacgcagaaagtttccaggttgcaagaccaagaatgtaaagatgttg

SEQ ID NO: 25189 - DNA, 279 bp, Glycine max
  Clone ID: 701099759H1
gaaggattgaagtttctgtctttttctgatctccgcgtgcgtggtttggttttgttgttgaagatgttggtagctaatagctttgatctatggcgaaaggacgcttttttctctgcggcggaagaggtgcaggaatcagctgatatgtacgttccccgattcgtctctttgattcacggttcctgttttggacccctttcagttgtttttcattggcttaatttaatcacaagattagaatggaatctgcatacagggcatggttgagagagaagagag

SEQ ID NO: 25190 - DNA, 279 bp, Glycine max
  Clone ID: 701099760H1
cacaatatcttaaggagttatctgtgaaggatccccaagcattcatttgccatttttacaatatctactttgctcattcagctggtggtcgaatgattgggaaaaaggttgctgaaaagttacttaacaacaaggcgttggagttctacaaatgggatgatgaccttccacgattgttgcagaatgtgagagacaagttgaataaagttgctgaaccttggagtcgggaagaaaaggaccactgtctggaagaaacagaaaaatcattcaagctctctg

SEQ ID NO: 25191 - DNA, 279 bp, Glycine max
  Clone ID: 701099761H1
gatgaatgttggggcaatgaaggtttggtttaagatgaggcccattgacggtggtgcatttttagaggtgaaatcggtggaggaattcacattcttaaattcatcatatgtcccgatcttgaggcaacttgagtcagcaaaaatgaagcagcggttcttagagaatcaagctgataatgccacaaatggtgcaaacctgaaaaatacaaagtccctgtccatgttggatcaccttcgattttatttgccagagatgtatcctaacttgtataagatctt

SEQ ID NO: 25192 - DNA, 226 bp, Glycine max
  unsure at all n locations
  Clone ID: 701099762H1
ttctcgctgtttgcggtccttcactcgccttttctcacttgtccccgtctnctccgatcttgtacgatcatcatctgccggcccttgagatggtcctgctttcggattcgatctcggttccacctacccccccgtcggattgtggcaccactaccgtgtcgacatcatcgcccatgaccagggttacagaaccacgccgtcttacgtcgctttcactgcttccgag

SEQ ID NO: 25193 - DNA, 283 bp, Glycine max
  Clone ID: 701099763H1
tagaaatggcctcttctcttgcatcctcatcaactgttctctggatcctttttctaaccattgcaactcttcatttgagttcagccaggaagttgtccgggtcagacccgcagttgcagtttcaataccacagaggccctctcctcaaaggcaaaatctcagtaaacctcatttggtacggtaaattcaaaccttctcaaaaagccatcgttgctgatttcatcacctcgctctcctctcccaaacccgtcaccgcccaaccatccgttgccacgtggtggaa

SEQ ID NO: 25194 - DNA, 270 bp, Glycine max
  Clone ID: 701099764H1
gctcgagacaagccaagtgaaagtgagaaaaaataaaaatcaaagagcataatgtcagggatcattcacaagattggggagacccttcatgtgggagggcacaagaaggaggaggagcataagggtgagcaccatgctggagaatacaaaggggagcaccatggtgaacacagtagtgagtacaaaggagagcatcatggtgaacacaaagctggagagtaccatggtgagcacaagccagagcacaaagaggggttcctagacaaagtc

SEQ ID NO: 25195 - DNA, 273 bp, Glycine max
  Clone ID: 701099765H1
ggcaagaaggaattggtgctcccaagattgaaaagcccttgcaaaggcacggaggcaggcttgagcacaatgagacttattgtggttcctgttatggtgctgaagagtcagatgatgattgttgtaattcctgtgaggatgttcgtgaagcataccgtaagaaaggttgggcactttcaaatcctgatttaattgaccagtgcaaaagagaaggattcttacaaagaatcaaggatgaagaaggtgaaggatgcaatgtgtatggtttcttgg

SEQ ID NO: 25196 - DNA, 278 bp, Glycine max
  Clone ID: 701099766H1
catttttcttcatcccccaaagtgacaatctttgtattcaattcatcctttctctctctccatggccacttgtgttgatgccccaacccctctttctcggaagcctaacgggtcccaatccgatgatcattccttcaattacatgaaattctgccgacccactttctctgatcgcgttccctgcatacccatttgcaagaatcgtgacactgccttcacacgcgtggaggagtttgacacatgtgtggaggataatgatgatattgaggttgaggttg

SEQ ID NO: 25197 - DNA, 276 bp, Glycine max
  Clone ID: 701099767H1
tctcgagccgaatcggctcgaggttgtgttgtgttgagcagagagactgatcaagaaaggatacgaagaaagagggaatagggctagggttagggttagggttaggttgaggatgccgaagaacaagggaaagggaggtaagaacaggaagaggggaaagaacgaggcggacgacgagaagcgagagctggtgttcaaggaggacgggcaggagtacgcgcaggtgctccggatgctgggtaacgggcggtgcgaggcgatgtgcatcgacgggac

SEQ ID NO: 25198 - DNA, 276 bp, Glycine max
  Clone ID: 701099770H1
agagaattacagagcattttccaacacgattacacgaccgaatcaaaccctctctttctctccgaagctgcgtttaatatcttactcgccttagattgttcttctctttcattatactgttctcttttcgatttgagggaacagtacaagagtgtgaggatcggttaacccaactgcacaggtagtcactaaaataatggagtctcacgatgagactggatgccaggctcctgaacgccccattctttgcattaataattgtggcttctttggaag

SEQ ID NO: 25199 - DNA, 275 bp, Glycine max
  Clone ID: 701099772H1
ggagcatgaacccaaggttgggtgattttggtttggcaaagcttatggatcatgacaagagtcctgtttcaacactaactgcagggacaatggggtacttagctcctgagtatcttcagtgtggaatggcaaatgagaagactgatgtgttcagctatggtgtggtggttcttgaggtggcttgtggaaggaggccaattgaaagagaggggcagaagatggtaaatttggtggattgggtttgggggttgcactctcaagggacgatcattgag

SEQ ID NO: 25200 - DNA, 276 bp, Glycine max
  Clone ID: 701099773H1
ttctattttccggtccggtcgaaaagataaatcggaccggaaaaaaaccgatcttctggccacggactcaaatattgagacgaagagcggtgccattaactactcgtctagaccgcggcacagcacgtcgagcttgaacgaggtgtcgttggaggagccagtctcgcgaaacagcgtgtcggagagtgaaccgcccggtttgggtggcatgatgcggttcgcgtctgggagaaggtctgagtcgtggggagtgggtgattccgaaggccacgtggc

SEQ ID NO: 25201 - DNA, 274 bp, Glycine max
  Clone ID: 701099774H1
gaaaagcattagaatagcgttggaggaggatccgtcatccctcgcaaagtattacttttgcagagctcatcaaaccgaaccttcattcccgccttcacgttttctttcctttcaccaacaacaacttttgtttcttttcctttttattgtattggtgaagcttcaccataattcaattatgagctccaccacttcgaaagccacgtccacgatttgattcctggatccaacgcatccattaagctttcgcgatggcgtggtttagtgggaaaaa

SEQ ID NO: 25202 - DNA, 274 bp, Glycine max
  Clone ID: 701099775H1
ttcgcaccttcgaaaatcaattttctgtcttctctgcgtcttcttcctctatcaatcgttttccatggctcgtaccaagcaaaccgctcgcaaatccaccggtggaaaggctcctaggaagcaactcgccaccaaggctgcaaggaaatctgcaccgacaaccggtggagtcaagaagcctcatcgctatcgccctggaactgttgctcttcgtgagatccgaaaataccaaaagagcacagagcttctgatccgcaagctccccttccagcgt

SEQ ID NO: 25203 - DNA, 272 bp, Glycine max
  Clone ID: 701099776H1
cggctgaagatctcgattagccgaaaattgcaagaacggcttcaggctcttgcgatcaacaaacgcagcgttttgatctcagatttgagggggagagaatggcaacaacagtgagaagtctgaagataaagacaagtacgtgcaaacgtatagtgaaggagctgcattcttatgagaaggaagttgagagagaagctgccaaaacagctgatatgaaggaaaaaggagccgatccctatgatctcaagcaacaggaaatgtcttggctgagt

SEQ ID NO: 25204 - DNA, 275 bp, Glycine max
  Clone ID: 701099777H1
gtggaccatcacatggaagtggtcatttgatggcgccctcgggctctgctgtggggggtttcaaccctggtgtgccggcccaggggttgaatccggtgctttcacaggcgttgactgcattgattaatcagggagctggattggggcttgggaatcttcttggagggcttggtggtgcccccgttaaccagggggggccgcctgctccatatgcgaatcaacctgctatggggtatgggaaccagccagcaatgcaacccggataccagaatcct

SEQ ID NO: 25205 - DNA, 278 bp, Glycine max
  Clone ID: 701099752H1
ggaatctcaaaacgacgtcgttgacggttgacgcggtttcgtgtttttatttttctcagatttatatatatagagaagaaggaaaaattgttgttgatgaagagttttctggagagacaactgaggtattggatgagaagaaaatggagaaaatgagattgtattaccaagagctgagtaactcaaaggaagaaccatggacagcttcatctacttctgtagcagatctttatcctgtgggcctagattcttcttacttggagaagagagattaaaga

SEQ ID NO: 25206 - DNA, 282 bp, Glycine max
  Clone ID: 701099727H1
aaaatgcccactttttttcttccaacgctcctcctccttctcatagccttcgccacctctgtctccggccgccgtgacctcgtcggagactttctccggctgccctccgaaactgataacgacgacaacttcaagggcacccggtgggccgtcctcctcgccggttccaatggttactggaattacagacatcaggctgatgtttgacacgcctatcaaatattgaggaaaggtggtctgaaagaagaaaatattattgtctttatgtatgatgacattgca

SEQ ID NO: 25207 - DNA, 279 bp, Glycine max
  Clone ID: 701099728H1
gaagattccaatcggagctcagaaaaaaaagaaacctaatcgccgatcgcgtcgaaagtccctaagcttacatcctgcttctagatagttggtaatcttatctgagggtagtagctagtaccatgggagaagtggcagtaatgcactctgagcctctgcagtttgagtgcaatgacattagtgtgaatatgactgagaaggaagtgtatcctccagaatcaaatgtggagcgcttacctggagaagaatcgagtcaatcaacagaccacaaaaatatca

SEQ ID NO: 25208 - DNA, 282 bp, Glycine max
  Clone ID: 701099729H1
gaaccggcgaaatgtcacccacagataaggaaaggcggtaacatatcaaaccgtaccttacgcaattggatctgcttttcttttctgctcttctgccgcttgatgcaacctcgacctggaaacgctcgttttggcaaaatctgaatctgaagcattggaatttggaagcgcatcgattcaattcgatgcgaggccacgattggatcaacacgctgatccccgacgagctactcatcgagatcttccgccgcctggactcgaagtcgagccgcgacgccggct

SEQ ID NO: 25209 - DNA, 280 bp, Glycine max
  Clone ID: 701099730H1
ccacttggcgatcttcaaattctgagagagatggatctggtccctttggttatggacttggtggcgcacttcagatgtttctgccaagagttctcctggttatgttggtggttacactgttaataagaggcagccaaataggggaatcgctacataggaagatcgttttgatgacacgaacttgtaggtgaagataatccagtgaagcaggtgaattgtgaattttgcacaccactattgttactgaatttcggttttaagacgcaagatgtttggtttt

SEQ ID NO: 25210 - DNA, 284 bp, Glycine max
  Clone ID: 701099731H1
atccgtgttcctctctctcatctctctttctctctgttccctcggtttccttactttgaagtttaatccaatccaataatccaataactacatacaaagttgaacaataccaccatcatagcgtatcatcatcagaattccaaggtggatttgcttcatcttttactccggcttcatgctgcatgagtaaaggccgttatgttatgctcatggtggatttttgtgcaactgggactaggggaattgatgatgtggtggtggtgagaatgatgtatggggagtag

SEQ ID NO: 25211 - DNA, 285 bp, Glycine max
  Clone ID: 701099732H1
caccaacgcaactaagaaagaaaccaaaagaaaaacaagaacaagtcaatttttcaattttcaatggaaaaccaaacctcatcgatgcagtttctcatcctcgaacaagttcagttcttgaaggtgaacgacgattccctcttgcagtgggaactcgtcgacgttgttgacgccgaagaggagatcgatgggttcggttcttcatcggattcttcttccgtttcttggttcgaatccgattcttctcccatcgatgcctcaattgaagaaattcgccaacttctt

SEQ ID NO: 25212 - DNA, 282 bp, Glycine max
  Clone ID: 701099733H1
ccggataggaagaacgggacgagctggtaaaatgggattagcaacggccttcttcaacgaaggtaatttgaacttggctaaatcattggctgatttgatgcaagaggcaaatcaagaagtacctgcctggctcagccgatatgcagcaagggctatttacagtggtggcaacagaaataggaagtctgggggatctcgttttggtggccgcgattttaggaaagagggttcgtttaataaagcaacggattactatggcagtggaactggtggtggatatgg

SEQ ID NO: 25213 - DNA, 278 bp, Glycine max
  Clone ID: 701099735H1
agagagcaaactggtaacatgtacaagaatgtgaagaggaagattgagagaggtgttgccttcccgacatgtgtgtctgtgaacaacactgtctgtcacttctctcctcttgccagtgatgaaacagtgttggaagacggtgatatagtgaaaattgacatggcttgtcatatagatgggttcattgctgctgtggctcacacccatgttcttcatcaggggccagttacaggacgggcagctgatgctattgcagcagcaaacaccgccgccgaagt

SEQ ID NO: 25214 - DNA, 278 bp, Glycine max
  Clone ID: 701099736H1
cacaacacgagcatttgtttcaattccaaatcaaagaggtcgaagaaaaacaagagcaaattgggatcgaagaatttgaagaacaccacaagcaagatgcatgttgttgtggtgctcaacacgcaatcctactgcagaggcctagaacctccttcatcttctccttccgtcgtttccaacaagggaacaaggactttgagtttcaggaggctgctgctgcgtccttctcttgggattcatttatcgcgtactttgctttaaagtgtgttgttactccg

SEQ ID NO: 25215 - DNA, 276 bp, Glycine max
  Clone ID: 701099737H1
ctagagttctaagcaatggcgattatctccgatttcaacgaagaggagccgaaacccgctcactcttcaccaccgcaaccccaatcctcttcttcttcgtcttcgttcagtgctacttttgaccggtcaaatcccatcgctttcctggagagagtcttcgaattcgtctccgaacagagcgactttctggcgacgcagagcgccgagaaggagatagtgtcgctggtgcacgccgccgggaagaagaagagagagcttctcaaggcggagagagaa

SEQ ID NO: 25216 - DNA, 273 bp, Glycine max
  unsure at all n locations
  Clone ID: 701099738H1
ccgaggtattgggggcaccgaaaccatctgggtcgggtgatggaagaaggggttatttgccagtggagcgtgtttagatctctcttggctatccttcagtggtgggctttcaatgtcactgtcattatcatcaacaagtggatcttccagaaattggatttcaagtttccactgtcggtatcctttatcctcttcatctgctcggtcnatggaggatatgtggtgattaaggtgctgaagcttaaaccactgataactgttgaccctgaagac

SEQ ID NO: 25217 - DNA, 279 bp, Glycine max
  Clone ID: 701099739H1
aaacaactctctttctctctctctctctctcagttctttgtaacgaaacgcaacgcaacgcaacgcaacgcaacacaaacgcacccttcctatactccgcagatcactctggcaccgttaattcggcgtcgccgtttcaaggaaaaaaggcattaaagaaaagattcccttggatcattcatggcatcaagatcatatgttaatctactagacttagctggaggtttactggatattcctcacacgccaccctaaattccaaggattatgacagttcct

SEQ ID NO: 25218 - DNA, 281 bp, Glycine max
  Clone ID: 701099740H1
cagagcacctactcactcgtaaatggcgaggaagaagatcagagagtaccactccaagaggcttctcaaggagcatctcaaacgtctcgcctctatcgacctccaaatcctctcagctcaggtgacagaatctacggatttcactgagctgacagaccagcatccatggctttcgtcaaccagattggtcgtcaagccagacatgctgttcgggaagcgcggcaagagtggcttagttgctctcaatttagacatagctcaagtcgccgagttcgtcaaag

SEQ ID NO: 25219 - DNA, 281 bp, Glycine max
  Clone ID: 701099741H1
accgttcgcaacacgatcactattctgcgacgatggtggcacattcgagttcttggggaagggcactcgtcgcgatctcgccctacaccttctccgccatcggcatcgccgtcgctatcggcgtctccgtcctcggcgccgcctgggggatctacatcaccggaagcagcttgatcggcgctgcaatcagggctcctcgaatcacttccaaaaatctcattagtgtaatcttctgtgaagctgttgctatatatggtgttattgtggctattattcttcaa

SEQ ID NO: 25220 - DNA, 278 bp, Glycine max
  Clone ID: 701099742H1
ggttgtttgggaatgcagccccaatcgggcggtaaattccgtccaaggctaaatactggcgagagaccgatagcgaacaagtaccgcgagggaaagatgaaaaggaaaaggaaaaggagagtggtgctcattgatatttaagattgagacaaggcttttttgttggttggagatgcatgattgtggtgtgctttgttttcatttcatcatatgacagccttgtgggtttctttggtgtttcttgatgcatacttaatttactttattattgtgtattt

SEQ ID NO: 25221 - DNA, 277 bp, Glycine max
  unsure at all n locations
  Clone ID: 701099743H1
caaagttccaaaccctaaacgagatcannntacttttctggttttctctttttcaatcggtgcttcctccggcggcgcgagggagtgtctttggcgcgtgattcctagttccccgcttacctatgcttcgctcgacccgcattgtagagttcacgccggagagacggcggaatctcaccggacgatcgtgatttcgcatcttcatggcttccgcctaccggaacgaacctaattggccacggcatagaagcgctggagctggattcatgggaaaagt

SEQ ID NO: 25222 - DNA, 278 bp, Glycine max
  Clone ID: 701099744H1
cgaggatatatcaagctcctctgaagccgttatctgacaatggggttgttgtaaccatttggtatcgtgcacctgagctgcttcttggagcaaaacattataccagtgctgttgatatgtgggctatgggatgcatttttgctgagttgttgaccttgaagccactatttcaaggggcagaagtcaaagctacatcaaatccctttcagcttgaccaacttgacaagatatttaaggttttaggccatcccacattagaaaagtggccttccttagca

SEQ ID NO: 25223 - DNA, 283 bp, Glycine max
  Clone ID: 701099746H1
cggctcgagtagttaaatccttctgctctgcgtcttcttgttcctctcgcccagaatccgagatcaaccctgacccctaaggccaggggtttttctcggcttcttcagattcctgaaatggcgtctgtttcagctttagccaagtacaagctcgtcttcttgggtgaccaatccgtgggcaaaaccagcatcatcactcgcttcatgtacgataaattcgataacacctatcaggctacaattggtattgattttctatcaaaaactatgtatctcgaagatc

SEQ ID NO: 25224 - DNA, 284 bp, Glycine max
  Clone ID: 701099747H1
ctaaaccaaacctctcactcgccgtcgtagggtttctcctttcgtttagcaacaacaacaatggttgcagccaagaaaaccaagaagacccatgagagcatcaacaacaggctcgctcttgtcatgaagagtggaaaattcaccctcggttacaagatggttctcaaatcacttaggagctccaaagggaaattgattatcattgctaacaactgcccccctttgaggaaatcagagattgaatactatgctatgttggccaaggttggagttcatcattacaa

SEQ ID NO: 25225 - DNA, 283 bp, Glycine max
  Clone ID: 701099748H1
gaaactctcatttgaagctaacaaacaacaaagatcaacggatctatctaccttcagtcatggtgttttctttcaaccaacgcttctgggtttcttcttcgcttctcctcctcgcggtcctctctgtttcttctctcactcccactttcctttctgacaccgttttcgattctcaaccagcgcataccggtcggaaccttcttcaggctaaaaagggttgttctgtgaatttcgagtttttaaactacacagtaatcacaagcaaatgcaaaggaccccggta

SEQ ID NO: 25226 - DNA, 281 bp, Glycine max
  Clone ID: 701099749H1
gtctgatatatctgattttgaatttgacccttgcggatattcaatgaatggaatagaagggagtgctatatccaccatccatgtcactcctgaagatggtttcagttacgcaagttttgaagctgttggttatgactttaatgacatggctctaggtgaacttgtggaaaggattttagcttgcttttgtccagcagagttttctgttgctttgcacattgacatgcagtctgagaaacttaataaatttcccttagacatcaaaggatactactgtggtg

SEQ ID NO: 25227 - DNA, 275 bp, Glycine max
  Clone ID: 701099750H1
ctgatatgcatcttagtaatggagataatcaaggagcaagtggtacaggccttggagttttattaagtcctatgataaaggttctggatgagatgtatagagcacaagatgatttgatcaaggaaatacgcaatcatgacaatgctaagaaagaatggactgatgatgaactgaagaaactatatgacacccatgaaaggctgctagatcttgtttcattgttttgttatgttccaagaacaaagtatctacctttgggcccaataagtgccaaa

SEQ ID NO: 25228 - DNA, 282 bp, Glycine max
  Clone ID: 701099725H1
aggtaattatatacaagactgtccaagagatgccacctaaccccaaggagccttgggaccttgaaatggactatgatgacactttgacgttggaaattcctattgaacagctaccagatggtgatggtgcagatatagcaatttctcccaatcaggttggaactcatactgttcaaggggtggcctccacttcttcaaccggtgtggctactgctgagcctgatttagaattgcttgctgtactgctaaaaaatccggagttggtatttgccttaacttctg

SEQ ID NO: 25229 - DNA, 108 bp, Glycine max
  Clone ID: 701099696H1
ccgaaatgtatcgaacggcggcgaacgagttggtgagcggtgcaagatactactatactggcaaggttgggatcagattccggccttctcagagattgataccctctt

SEQ ID NO: 25230 - DNA, 283 bp, Glycine max
  Clone ID: 701099701H1
ccaagatgaagaggcagagaggtgtgcatgtgaatgctgttaggcccatcatgaataatcatcctcccaatgttgaagatgtagctgcagctgcaatggggaagaagaaagtgaagaaagagggtgagcagaaggtggggaatattatggtggaggaagaggagataaaggaaagtagtactagtagagacagcatggtgggtgggtatttgcagcaacatcaacaaggtggcatgctgatgggttggaattgggaggagaatatgaatatgccattggtggg

SEQ ID NO: 25231 - DNA, 285 bp, Glycine max
  Clone ID: 701099702H1
tctcccaactcgccctcgactcacatccttgtccgattccgcgaacgagtctgactccatcgggttggtaagatctattctgtttcttcgtcatggcaaccggacaactattctcgcgtactacacaggctttgctttacaactacaagcaacttcccatccagcggatgcttgattttgacttcctttgcggcagggaaacaccatcagttgctggaataattaaccctggttctgagggatttcaaaaacttttttttggtcaggaggaaattgccatcccag

SEQ ID NO: 25232 - DNA, 281 bp, Glycine max
  Clone ID: 701099703H1
atgagtatgtacggtagggatccgtggggagggccgttggagatccacgccacagactccgccaccgacgacgagcgcaccggaatctccaggagctggaccgaggcgctttagacgagacacaacagagctggctcttgggcgccggagaacagaaaaagaagaagaaaaggtacgtagatcttggctgcatcatcgtcagccgcaagctcttcatctggacactcggcactctcgccgtctgcgacttcctcgccggcttcatcaccctcatcgtcaaa

SEQ ID NO: 25233 - DNA, 278 bp, Glycine max
  Clone ID: 701099704H1
atcacattttgttcatcatcgccttcaacgccctgaccttgaagacgatgagaaccaacaagaccaagacaacaaccttaacgatcacgaagggcttgacctaattacaccaaatccaggtcctggcgatgttgttggtcgcaggccaagaggaagacccccaggttcaaagaacaagccaaaaccaccagttatcatcacaagagagagtgcaaacacccttagggctcacatccttgaagttagtactggttgtgacgtctttgaatcggtcgcta

SEQ ID NO: 25234 - DNA, 278 bp, Glycine max
  Clone ID: 701099705H1
cgacgccaagctcttggcaaagctcttcgatgtggtcgctttcacccacgtgatgcacctcgcggcgcaggccggggttcgctacgccatggagaatccccactcctacgtccacagcaacatcgcggtcctcgtcacgcttctcgaggcctgcaaatcggcgaaccctcagcccgcggtcgtttgggcctcgtccagctccgtctacgggctcaacgagaaggttccattttccgaatcggaccagaccgaccggcccgctagcctctacgccgcaa

SEQ ID NO: 25235 - DNA, 279 bp, Glycine max
  Clone ID: 701099706H1
ggagtttcaaaacaagttttatgagggtgatggatacaagttccaccctttctcgttctcctggctggatgatgaggaatgatatgctctaaactcgcattaataagaacgaagagttatatagctttggacctgtattgattctttcatttgatgtaactagtcagtaattggtatctgtggggcattgtatgtggtggaatccttggagcattttcatcaaacgtgccgttttgtttatttatccattgagggaataaatattcccaattaggggag

SEQ ID NO: 25236 - DNA, 279 bp, Glycine max
  Clone ID: 701099707H1
actcgagccgctcgagccgctcgagcggtgaggttccggttaaacctgtggttgcagatgaaactagtactgagagcacaaacaatgatgaacttgaaccacacgaagagggttatggcgaaaaccccctcagtgaagaggcaatcttgtgggaaatacaaaggtgttcggatgcggaaatggggcaaatgggccgcggagattcgtgaccctttcaagggcacgcgaatctggttgggcactttcagcactgcagaagaggcttctcaagcctatgag

SEQ ID NO: 25237 - DNA, 280 bp, Glycine max
  Clone ID: 701099709H1
cttactcaaacagataaaggaattgaaatcgaggctggtgcaagaagagaacaacaacaacactgaaagcgatgtttcggtgaaggaagagatgatagccactctgcaggatagtaacccgctctgtgaatccgccattcctggatcggactcgaaggagttgagttacgagtgtttcaacaagagtgatgaggtgggagggggttctgtgttccctgtggatttcaaagatgggtcttctgatagcgactcaagtgcgatcttgaacgaggagaacaac

SEQ ID NO: 25238 - DNA, 280 bp, Glycine max
  Clone ID: 701099710H1
gcagttccacacaagcaccttcatctaaaattcaagtatcgaagaagaagatggctttaggtgttcctgctcttccgttgacatacgtggctcacgttctggcagttgttgccagcgtcttggtcgtggtctgggtcgtcaatttcaggggtggcttggcttgggattctgataacaagtccctcatcttcaacattcatccagttcttattgttattggcttactagttcatgggggtgaagctattataagttacaaagcttttcccctaaagaagga

SEQ ID NO: 25239 - DNA, 256 bp, Glycine max
  Clone ID: 701099711H1
ttcgagccgcaagagagagctagcagtgcaagctttcaacatccaaaacaacagagagtttttggatttagaagctgaaggaatatagttatcacaatggggagagctccatgctgtgagaagatgcggttgaagagagggcaatggtctccagaatcagatcaaattctcatcaattacatcaacacttatgggcatgctaattggcgtgcactgcccaaactagctgggctattaaggtgtggaaagagtgtta

SEQ ID NO: 25240 - DNA, 283 bp, Glycine max
  Clone ID: 701099712H1
gtttctgatggtgtcatgaccttcactcttgatgctgctgaagaattgggtgtccccgaggtgctgttttggaccactagtgcatgtggatttatgtgttacgtgcaataccaacaactcattgaaaaggacctaacacctctcaaagactctagttatatcacaaatggttatttggagactaccatcgattggataccaggcattaaggaaattcgattgaaggatattcccagtttcgttaggaccacaaatccagatgagttcatgcttgatttcatac

SEQ ID NO: 25241 - DNA, 280 bp, Glycine max
  Clone ID: 701099713H1
gagattagagaaacaactatggaaggagaaaatggaaagaagctgaaaatattgtgcctccatggattcagaacaagtgggagttttcttaaaaagcaaatcagcaaatgggatccttctatattcactcaatttgatatggtaattaatgtttttttttaatgttcaagtttgtgcatgcatgaagcatttttaaccttaagcctgttgttcttagacatttcaaattcttccttttattagtgttagtgctgattagcccttgttcttaataattgct

SEQ ID NO: 25242 - DNA, 285 bp, Glycine max
  Clone ID: 701099714H1
ctgatttgcactgcagctgttttgggtcgtttgccagggacaactgtttataggaatgttaaacagtaccctgaagcatatacatataatggaattgtaatcgttcgtgttgatgctccaatttattttgcaaacacaagttacataaaggacaggttgcgtgaatacgaagttgatgttgattgttctaaaagacatggacctgaggttgaaagaatttattttgtgattctagagatggcacctgtgacctacatagattctagtgctgttcaggctttgaaa

SEQ ID NO: 25243 - DNA, 280 bp, Glycine max
  Clone ID: 701099715H1
tgtcactggagccaacgttcaggtttgctgggagaaatttgcaaggtactttgaggtggagttgaaggaggtgaagctccgtgatgattactatgtgatggaccctgaaaaggccgtggaattggtggatgagaacactatttgtgttgctgctatccttggttcaacactaaatggagaatttgaagatgtcaaacgcttaaatgatctcctaattgaaaagaataaaataactgggtgggacactcctattcatgttgatgcagcaagtggtggcttc

SEQ ID NO: 25244 - DNA, 285 bp, Glycine max
  Clone ID: 701099716H1
ctcttgatgatgtgctggccaatttcgataccaatcttggaattcctttcggttctgtgctcaatgatgctgttcgtataagctacgccgcacacctgatgcttgtatttccagttgtcttctttccattgcgtctcaacatagatggcctcctcttctctaaatcaaggcctctggttctggataacttcagatttgcatcactcactattgcccttattggtgttatcttcctgggagcaaatttcatacctagcatttgggatgctttccagtttactggag

SEQ ID NO: 25245 - DNA, 308 bp, Glycine max
  Clone ID: 701099717H1
caagcgaacgtcagaactcggctcgagacattaatttgtgatagctcaccatggccattgctacttgtgatcatgataagaacgcaaaggctttgcagttcattgaggatatgacccaaaacactgaaagtgtccaagagagggtccttgctgagattctcagccaaaactcccagaccgaatacctgaaacggtttgagctgaatggagccacagaccgcgacactttcaagtcaaaggttcctgtcgtttcctatgatgatttgaagcatgatatccatcgcattgctaatggtgaccgctctcct

SEQ ID NO: 25246 - DNA, 275 bp, Glycine max
  Clone ID: 701099719H1
ctggaagttcaagcaatagttatactcccttccgtggtcctcctacttcatctgaatcaaggggactgtcatctggggtaaacccgttcgagaggcaaggtgatagtgaatttggaattccatattcgttacaatctttggttgttgctggtgaaggaagtagtagacttgtatctgagctgcgcaatgtgttgggcctcatgcgtaggggtgggaacctgcgatttgaggatgttatgatccttgacccttcagtgttctctggaattgctgat

SEQ ID NO: 25247 - DNA, 278 bp, Glycine max
  Clone ID: 701099720H1
gggatctccgtcaggttagaaacgccgttttgcgccaaaccggttttctcgattgatttaatataatttaatttaatttacctttttttttctctttctattttgaggtggggaagttaaattttgatagcttctctgcatcctgtgatagcttctctctatgtaacttcgctttcggatgatctttttgttctctttgatttatagaatctgtaaaacgatgtaagttgttggaccaaacttggataaagttctctattttttttttttcattttct

SEQ ID NO: 25248 - DNA, 280 bp, Glycine max
  Clone ID: 701099721H1
ctaatctccatctaatagtgtttatttgtctttctctatctctatcggtcatgggtgcttttgcttttgatgaggaaaactcctccaccgtggctccggcaacactctacaaagctctgacaaaagatgctgacactatcatcccaaagattattggggccatccaaactattgaaatcgttgaaggaaatggaggacccggaaccgtcaagaagataacagctagtgaaggtgaccaaaccagtttcgtgctgcaaaaagtggatgcaattgacgaggc

SEQ ID NO: 25249 - DNA, 279 bp, Glycine max
  Clone ID: 701099722H1
gaaaaaccaagtaatactagccaaaatatgtctcccaaatacatgtcccttttcctcctagtaatactagggatggcttttctggccactacttcccttgctgatcgtcgttttctttcggtggaagatggtcatgatcaccatcaccaccacccaccaaaaaaacactggcctccaaccacacaaaatgaaccttcaaacgtagaaaacaaggagaacactgaggtggaggatggtcatgatcatcaccatcactacccacctaaaaaacactggcct

SEQ ID NO: 25250 - DNA, 281 bp, Glycine max
  Clone ID: 701099723H1
caacataatgatgggaaaaagtttttcaaacccaatttggaagctgatcacatctccaacctggttgaatgcatacaaggatggtcatgttgcaccatttgttaagtctgaacccattcccgagactaacgatgaacctgttaaagtgctagttggggccagtcttgaggacattgttttcaaatctgggaagaatgttctgctggagttttatgctccctggtgtggtcattgcaaacagttggctccaatattggatgaagttgctatctcatatcaaa

SEQ ID NO: 25251 - DNA, 279 bp, Glycine max
  Clone ID: 701099724H1
cctcactaagcttctcactgatgagaataggggagaggatctgcgcagcttcttactcagttgaggccattcttctccttgatacctaaggcaaaaactgcaaagattgttaggggaataattgactcggttgctaaaattccagggacatctgatctacaaattgcactctgcaaagaaatggtgctgtggactcgtgctgaaaagcgtacctttctgagacagcgagttgaggcaaggcttgcagcacttctgatggaaagtaaggagtattcagaa

SEQ ID NO: 25252 - DNA, 233 bp, Glycine max
  Clone ID: 701099695H1
cgtgagtgttgaagagattcgtaaggcgcaacgtgcagaaggccctgccactgtcatggctattggcaccgccactcctcccaactgcgtggatcagagtacctatcctgactattatttccgcatcaccaacagcggcacatgaccgagctcaaagaaaaattcaagcgcatgtgtgataagtcgatgattacgaaccgatacatgtacttaaacgaagagatcctgaaagg

SEQ ID NO: 25253 - DNA, 257 bp, Glycine max
  Clone ID: 701099660H1
cgaaagaggtttttgattgaagctggcgatatgaggaaggggaacaagaagaagaacaagctggtgtggatgatagcgacgccgtttagggtgttggggaaagcgagggacatgtacgtgagcagcataacgagtgcggtcacaacatgaattacagcaaccccgtggatgctgctggcagattccaggctttgcccaggagttacagtgctgccacgtcacgctccgacaacaacgaggatttcgccgaacttttg

SEQ ID NO: 25254 - DNA, 239 bp, Glycine max
  Clone ID: 701099661H1
cttctttttcctgaactcagtttcagtttctggcaaagccctaaaatggaggggactgtcttcactcctgcactgcaagaaattgagcatgtaaagactgatcaaggagaaattctgagcaagcctttcttggatggtgcaaacacatattgcctgtaatagataagactggagctgctatggcccttgttaaatctgacataggtggtaacatatcgagattggaaactatgtattct

SEQ ID NO: 25255 - DNA, 224 bp, Glycine max
  Clone ID: 701099662H1
ctgttttctaaatctcattcttcacctgcaactatttggattgctgatttttgttaataccatatttactgatattggcgcatttctttgagaaagttactaattcctagatagaggcaaaaatgttgggaattttcaggagaagttggttaaagcacccaaagagctgaacagtccagcttcgttgaattcatgcactaagccgaagctaagtcacgaaatcc

SEQ ID NO: 25256 - DNA, 221 bp, Glycine max
  Clone ID: 701099663H1
atcacattgattccgaagagaaaagaaaagatgtttgagccacaacagctatacactcgcgcgaagaccgaggaattcgacctcgaatcaggagaaaccctctacccagggctgagcgtcggcgagaaccagctccgatgggtttcatccgcaatgtctacggcatcctctccgcgcagatcgtcctcaccaacctcgtctccgtcaacaccgttttctat

SEQ ID NO: 25257 - DNA, 82 bp, Glycine max
  Clone ID: 701099664H1
atcgagccggtgaaaacaagggctcggtggtggatgaggatgatacggaggatagaaaacatgattggaagggtttggtgtg

SEQ ID NO: 25258 - DNA, 69 bp, Glycine max
  Clone ID: 701099666H1
gagtttgctagacaatctggtttatatggtggatttttattttttatttttttatgggctcatacacat

SEQ ID NO: 25259 - DNA, 88 bp, Glycine max
  Clone ID: 701099670H1
catttgctactcttcacccttgagaatttgtcattccgacatggaacttatttttaagcaccattttggcctgacttgtgtcttagta

SEQ ID NO: 25260 - DNA, 87 bp, Glycine max
  Clone ID: 701099671H1
gaatacccctctctgcatcacctttggttctccccttgtcggtaagaaaaagtgttcaagaagcgatatcacgtaggtctacatgga

SEQ ID NO: 25261 - DNA, 250 bp, Glycine max
  Clone ID: 701099672H1
actgtccctttctctctctcaaactaaaaactaaaacccattttcttctccaaaaccttcgactttcttttctctaaccgaaacgcgcttcgcagcacttcttctccactctctcacatctctgacccattgcgtatatttacgcactgtgtcaaattcccccataaaaccggtattgattctccctcagagcacaatagagttctgagaggtagcagtgttactcgcaatgaaaaatcttctgtagctt

SEQ ID NO: 25262 - DNA, 96 bp, Glycine max
  Clone ID: 701099674H1
cgaagcgtgaagcgttttccctctgcattaatttgtatctgcagtctgcaacaacttcttcttcagttcttcacaccaatcacgtaccgctttgca

SEQ ID NO: 25263 - DNA, 58 bp, Glycine max
  Clone ID: 701099675H1
gtcctggtgaccggcgcacgtctatcgtggggccacacgtgtccatcgctctgaagcg

SEQ ID NO: 25264 - DNA, 254 bp, Glycine max
  Clone ID: 701099676H1
aaacaaaaagaggttgatgcaaatggtagttctcaattgcagccatcaccatcaagtaattggttttcttcaaagtcaacaaaaaaggtgcctctttcctctgtgacatcaataattgaaggcttgaagagctctacattcagaagttgaagccattagaagttaattaccgttttaatgattttgtatccccattactgacaaatagtgactttgatgccaaaccaatggttatgcttttgggtcagtactca

SEQ ID NO: 25265 - DNA, 256 bp, Glycine max
  Clone ID: 701099677H1
gcgccggaggcctaattccactcttcggtgctccgcctcctcgttctcggagaagcaccacacgaactcctcgaactccgacgacgtggtggagctccccctgttccctctccctctggtcctcttccctggcccatcctccccttgcagatcttcgagttccgctaccgcatcatgatgcacacgctcctccacaccgacctacgcttcggcatcatctacaccgacgccgtctctggaaccgccgaggtcggct

SEQ ID NO: 25266 - DNA, 256 bp, Glycine max
  Clone ID: 701099678H1
cgtccatctggtttcacaaatgctcccgtcacaagggccttcatcatcgcttcggcgcttttcactatcttctttgggatccaaggccgtttcggcactctggggttgtcgtatcaggatatttttggaaagatcgcctttggaagttgatcatgtccatattttccttctcgtccacaccagagttgatgtttggactgtatcttctatattacttcagggtctttgagcgacagataggttccaataaatactc

SEQ ID NO: 25267 - DNA, 75 bp, Glycine max
  Clone ID: 701099679H1
ctcgagccgattcggctcgagccaaactccatttctcactcgccgaggtgtcttccgtctagggtgtctcctctt

SEQ ID NO: 25268 - DNA, 257 bp, Glycine max
  Clone ID: 701099680H1
cttatagttagagatatcactactacaccaccctgcatagtttgttcagctataatactacttgagcttctttacctacgtttcaaacctacattgcacacaatatggcaacctcttggtcatgttatctacttgcatgctctctttgtatgtcaactattgtatcagagagtagagtggcaaggaaggacttgggcctggaccttggtgggttgggggttggacttcgactgggtttgggcctggggatatgaggt

SEQ ID NO: 25269 - DNA, 253 bp, Glycine max
  Clone ID: 701099681H1
cacaaggactgggttttcactgatcaagcattacctaatgatcttgtaaagagaggagttgctgttaaggacccatctgctccccatggagttcgtcttttgattgtcgactatccttatgcttctgatgggctaggatatgggatgccatcaagtcctgggtgcaagaatatgtctcattctactacaagtcagatgaggaactccaaaaagaccctgaactccaagctttgtggaaagaacttgtagaggt

SEQ ID NO: 25270 - DNA, 274 bp, Glycine max
  unsure at all n locations
  Clone ID: 701099682H1
gtatgtacggtattcggctcgagcttagctcgatctcttgggctcgtcgaattcgaaatctgatctccgacgattggtcccggtagtgngtagtacactctccaatctgcaaaaatgcctctcagactcgaaatcaagcgcaagcttgcgcaaagatcgagagagtgaaatgtgtggatctacatccaacagagccatggattctggctagtttatactctggaactgtctgtattggganataccagtctcagaccatggcaaaatcttttga

SEQ ID NO: 25271 - DNA, 251 bp, Glycine max
  Clone ID: 701099684H1
ccgcttccgccaggtctttgggcaacataatcgatgtagatttggttgtaaaacagcaggcccaaacccagacccggcccgtttcctcaaatgggttgcccaagtcgacgagcgttggcatgggccggatcgacaggacacgccttatgatttgggggaaggggaagttcccgttgtgcccaaagcctatccaagaagtagaagctatgctgttggaaagacaagtgctgttttgtaaattgtcaagtact

SEQ ID NO: 25272 - DNA, 257 bp, Glycine max
  Clone ID: 701099685H1
ctgagggcaaggtcctggagcaaggaacctatgctcaacttaggcacaagagaggtgccttcttcaaccttgccagccattaaaatccaaacttaggtaatgtaaattattattttcatgtacaaatttgagttcatggaggaatgtagcattgtgagcttgcttgggacaattgcttcctgcacctctggactttcttcctgaaccctactttggaacgtaaaacttacattccagattagtcattctggaaagac

SEQ ID NO: 25273 - DNA, 254 bp, Glycine max
  Clone ID: 701099686H1
atctaatagcaggattccctaatccagccatctcgaaatgtccgacccggaaaacacacccgcgccccaatcggagcaagactcctcttcgccaccgcccgcccaagaccaacccgtcgccgctgacgccaagctggccccgccggcgtctccttcagcatatggccccccactcagcgcacgcgcgacgccgtcatcactcgcctcatcgaaaccctatcctccccctccgtcctctccaaacgttacgggac

SEQ ID NO: 25274 - DNA, 256 bp, Glycine max
  Clone ID: 701099687H1
agatttttggtggaatcgttaatgctggaaaccccgaattggaattaacagctcttgctgaaaatgactatttggttttcaatttcaatgattacccaaatggaattgtgacacttttcaattttcttgtcacgcaacctgggacgaagttatgacgagctacaaggacttaactgggacttcttggacttatttgtacttcattagcttctacttaattactgttttgctgcttttgaacttgattattgctttt

SEQ ID NO: 25275 - DNA, 240 bp, Glycine max
  Clone ID: 701099688H1
ctcaaattgatttttcttgggcgcagaggttaggacaatgttgtaacgttgttagtgttttggttgtaaccaaattttgggaatgtaaacattactttatcgttttatatgcttatgctccaaaatgaaaattgtagctttattttccaaaaaaaaaaaaaaaaaaaaaaaaaaaaaaaaaataaaaaaaattgggggggccccccatttaggagccccgccacccgggaattttttcgg

SEQ ID NO: 25276 - DNA, 251 bp, Glycine max
  Clone ID: 701099689H1
cgacagaaatcaagcattgggtcgaactcttctttgatgtcaaagtaatagctatgaatagtcatcgactcccggtaaacggtagaagagtacgacctattatgggacatacaatgcattacagacgtagattattacgcttcaaccgggttattctattccacctcttagaaagaccaacccttaaatcacaatacttaatagcatggcgatacatttatacaaaacttctaccccaagcacacgcaatg

SEQ ID NO: 25277 - DNA, 251 bp, Glycine max
  Clone ID: 701099690H1
cctcgagccgattcggctcgagatttactcatgaagttgtgctgtaaccaaattctgttattacctttcctgcatctggaaacttggattacaagttgtgttccaactaaaccggttttgctgtgccaattaatagacaaaaggaaccaggaaatatggaaatgacaagggaaatattataagaaaatgacgatgtaataactacaattcttagttaaactttatgtttaaggtatgtgcataatatgtaa

SEQ ID NO: 25278 - DNA, 250 bp, Glycine max
  Clone ID: 701099691H1
ctagcttcttccatcctcagagcttgccgtcaacaacgattcctttcggttttctgtttctctggattcattttcatttttacggctaccagaatgtccagctcatcggaatattcggcattttccggccccgcccggccaagtcgccggccgagaagtccactttctctcagacttgtagtctattgagccaatacatcaaggaaaaaggtgccttcggagaccttaccctcgggatgactcgcacccc

SEQ ID NO: 25279 - DNA, 251 bp, Glycine max
  Clone ID: 701099692H1
cttcttcaaaatgatattgatttgctaaatcctccggttgagcttgagaagaggaaacacaagctcaagcgtcttgttcagtcaccaaactctttcttcatggatgttaagtgccagggttgcttcaacataccactgtctttagccactctcagactgttgtaacatgcggaaactgccagactgtcttgtgtcaaccaaccggtggccgggcaaggctaactgagggatgctcctttaggaagaaggga

SEQ ID NO: 25280 - DNA, 222 bp, Glycine max
  Clone ID: 701099693H1
ctcgtcccaattaccgtttttgcctctgctgtgggttccttctctgttctcagatctcactcagttccttcgccggagccatagttcttgattccctcaccaccgtgattcgtctttccaaacttcttttcactcgagtgagaatgtatagtaatgttggatcccaacccggagtacagcagcctcaaacaagtttgcctccaaatccttttgggagcgcgt

SEQ ID NO: 25281 - DNA, 233 bp, Glycine max
  unsure at all n locations
  Clone ID: 701099659H1
ctcgagccgattcggctcgaggcatggtggaagctagagtaataactgcngaacatggtcaccgtttctgtgggggctctacccaggttctcatgatgttcgatttctcttattcttacccatcttcttataataaatatttatgatgacgtgtttcaggttctgtctcagacggagtcagtatataagacacctgctttctaacggtggtggagcagaggggtgtaggttca

SEQ ID NO: 25282 - DNA, 244 bp, Glycine max
  Clone ID: 701099611H1
ccattttctagggtttatacaattctcgatggcttcttcagatgttgagtaccgttgctttgtcggtgggctcgcttgggccactgacgaccaagctctcgagagagccttctctcagtacggcgaaatcgcttaaacgaagattatcaacgatcgtgagactggaagatccaggggttttggatttgtgaccttcgcctcggagccgtccatgaaagacgccatcgaagggatgaacggccaa

SEQ ID NO: 25283 - DNA, 223 bp, Glycine max
  unsure at all n locations
  Clone ID: 701099612H1
ctcttccattcacaacctttaacctttctttcttgtaaactttatctgattgattctgagaatagaactaagagggtatagacatggctagcgcaattgcagcttcttttttggttctgcttctggctttcccatgtattggagctgacatgagttgtgaacagtggtggcctcgggttattacacactggcctggganactcacagtgggcacttgggtcag

SEQ ID NO: 25284 - DNA, 258 bp, Glycine max
  Clone ID: 701099613H1
ctaaagactatgattttcaccttcttgatggccgttcaatcagggttcccttcatgacgagcaggaagaatcagtttattagggcttttgatggtttcaaagtccttggtcttccctacaagcaaggtgaagataacgccaattccaccatgtactttttccttccagaaacagaagatgggctgttagctttggctgagaagttggcttcccaatctgggttcttggaacgcgagcttcctcctagcaaattggaag

SEQ ID NO: 25285 - DNA, 265 bp, Glycine max
  Clone ID: 701099615H1
cacaaaccaaatcaatctcctattgctaacataacctatagcctagcaagttggcaaattgcgttctagcacaggcaaattgatggagctagctagctttaaattgcctctagtgagtcatgatgcatcatctttctttatcatacaaaaaaatataggttaagaaagttcgactcagttcagagtagggaaagcctctgatcttcttgttcttgaaagaaaacactctcaacactcaacagaaattctggctaatcctgggtgg

SEQ ID NO: 25286 - DNA, 259 bp, Glycine max
  Clone ID: 701099617H1
ccgctcgagctcgagccgctctttcgaatttcgatactttgatcagatccacaacacttcttcatccataccgcttggatcttcaggatccagtgtcgtggttccaaggaacttcagattgctggaggagcttgagaaggagaaaaaggaataggagatggcacagttagttatggaatggatgatggtgatgacatttacatgcgctcttggactggacccattattggtcactataatactgtacatgaaggaagaa

SEQ ID NO: 25287 - DNA, 257 bp, Glycine max
  Clone ID: 701099619H1
ctagccatcaaaacaacgtttgtttaacaaaacccattatcagatcagatccgatcagatcctcttcagattcggatcaccgccgagtccatgagcacgccagcgctttcagggggcacgggcctcttctctggttcacgcgtttatgcaagggccactgcggtggtgcttgtttgcggtcacactgcggttcagtttatcccttcagctgttaactatcttgctcttattcccgccaggacaatcccatttgcctg

SEQ ID NO: 25288 - DNA, 252 bp, Glycine max
  Clone ID: 701099621H1
cctggaacatgattctgctgcaaaggttacaggcatgcttctggagatggaccagcctgaagttttacatctgattgagtcaccagatgctctgaaggcaaaagttgctgaagccatgacatgtgttgagaatgttgctcaacagcaaaccaacccagctgatcaactagcctcactctctctcaatgacaatcttgtgtcttagattccgcctagtcatttgacaagaatctgtacaccagttatttctat

SEQ ID NO: 25289 - DNA, 252 bp, Glycine max
  Clone ID: 701099622H1
gctgatgtggagcctagcatagcaccagtgcaaattgatcaaagtcagcttctaattgatgggaaatttgttgatgcagcttctggttaatatcttaccttcatgaaaaacttttccaacttttgatcctagactggagatgtaattgccaatgttgctgaaggagatgctgaagatgtaaatcgcgctgtccatgctgctcgcaaggcttttgatgagggaccatggccaaagatgacagcttatgaaaga

SEQ ID NO: 25290 - DNA, 250 bp, Glycine max
  Clone ID: 701099623H1
ctcgagccgggacccgatgccggagcagccggatccgtttcgagcccggtggccgtgattactccttcggttgtgctgtcaatgctcgccatcttcaagcactgaatgtcacgatgccgattttttattttctgtggatttcgtgtgagcgttattgattcgttctacacatagacgtttattgttgttgatttatactgtaattcgttacggagtgatgattattacgcgctgatgttgatctatgtat

SEQ ID NO: 25291 - DNA, 249 bp, Glycine max
  Clone ID: 701099624H1
ccttgctgagtaagttacggatgacgtatacgcacagatcacgttggtgccggaatctaatcttgatgatccgatgaaccctgacccgtgcactgctgttcctccaagtgcaccagttcactcgttcatcaagacttgacagcttcagataccagcacccatggtggcttctctgttctcaggcaacatgccatggaatgccttcctgcgttggacatgtcacaaccaggcccatctctggaattggtt

SEQ ID NO: 25292 - DNA, 255 bp, Glycine max
  Clone ID: 701099628H1
accgcaaacaacggtttgcggcgttttgaggggaaccgcaaggccaccgttgggaacgaatataaatttgggttgcttctacctagtgggaatgcccgttgcggtgaggttgagtttctttgccggctttgatttcaaggcttgtggcttggtttattggcagctcaacctcttgtatgttcaccatgttaattgtgttggctcgaaccaattgggagggtcaagttcaaagagccaaagaactcacatcatcgt

SEQ ID NO: 25293 - DNA, 258 bp, Glycine max
  Clone ID: 701099631H1
cttgtagcaaagaaaggtaaaggatatggccggcaagttgttgggtgcataccttatagatataaacaagacatagagggtaaaatgagcaacgaattggaagtactagtggttagttcacagaaaggtcaaggattgatgtccctaagggaggatgggaacttgatgaatccgtagaagaagcagcttaaagggatcccttgaagaacaggagtaatgggatgattagcgtgaatggggcatggatttcattagcaa

SEQ ID NO: 25294 - DNA, 254 bp, Glycine max
  Clone ID: 701099632H1
atctcctagcaatcatgtaaaacatggacgaaaaggtgcctcaaaaattaattcccatcatgaggatgccaaagagagttctgagttatcaaaccctgaagatatatctaaagctgagattaactcaggtggttctgaagcagacaggctgaagggtctgaaataattgtaactaagcagaagaacatctaacaagaaagcacaatcagtttcacgtggaaagaaacttaagaaagagaagagcttaaggtata

SEQ ID NO: 25295 - DNA, 102 bp, Glycine max
  Clone ID: 701099636H1
cacacaactcagtttccaattcaccaaactcacaatggttgatctagattggcaaacaaagatggttcagtccaacatcatgcgtccaatgtcccccaaagt

SEQ ID NO: 25296 - DNA, 87 bp, Glycine max
  Clone ID: 701099638H1
ctgaacccataacagctagttaatggccctcgctttcacttcttcaatttccgcaccacctaccacagtcccatcatcgggacacaa

SEQ ID NO: 25297 - DNA, 251 bp, Glycine max
  Clone ID: 701099639H1
ctttaaacgtctctctctcttcgtcccttgctctgtagcttggaatctgcagttgtagatcggagactgggcaagaaggtcgcattagcttcttcatcgcgcaatggcccatccctctgctgtcgtctcctcagaaggccaatcacccacgtcgtttttgacatggacggtctcttgctcgacactgagaggttctatactcaagtccaggaaatcatactcgctaggtacaacaaaacctttgattggtc

SEQ ID NO: 25298 - DNA, 81 bp, Glycine max
  Clone ID: 701099640H1
ccagattcagttactgcgtttcggaagcagatacagatggctcgtacgaagcaaaccgctcgtaagtccacaggaggaaag

SEQ ID NO: 25299 - DNA, 100 bp, Glycine max
  Clone ID: 701099643H1
gcgcctcttgatagggtctcccattttcaattccttctcagtttccttttctctgaaaaaagatgttgagggttgcagctaggaggctctcttctctctc

SEQ ID NO: 25300 - DNA, 261 bp, Glycine max
  Clone ID: 701099646H1
gcttagtaataatttggtctagaaactagcgcacctttccgataattatctagctacatcacttcttctgcgcttgtttgggagtgtggtggcaaaagttgagtttatatatgatcgatcaatatttgatgcccactattcaaggcatggtgtacaaaattttctgatatgtaagtctatttgcctttactcttaggggcccccatttacggggatgatggaggatggggtgagttggacaattgaaattttcatttttgc

SEQ ID NO: 25301 - DNA, 263 bp, Glycine max
  Clone ID: 701099647H1
cgccgctgccaagaagaagtgattgcatttgggcaattttgctagcacatgtgatcatcatcgtggttactcctttatagtagttttatccttgcagagtcttaggtgttttgtttaagttatatttttaagtttctgcgatttcatgtagccgtaactttcaaaactaggttcttgatcggcggtggtcaattttcattgctgtttgtttttgatgagtactgttttttgttttgatggtaagaagagtctgagatatttcg

SEQ ID NO: 25302 - DNA, 268 bp, Glycine max
  Clone ID: 701099648H1
aatctaactaataaaatagtgaagacatgagtaatggcacaatcaacacaagacaaagatgaaactggagtgttgttgttccaagttgccgccgccgcgttcatcctaggccagaatgaggcggttgcgttgcgttgttgtcctcctcggtgagtattcagtgttgttcgatctggaatggagaacgtgttttatcatgattttcattgttaataattttaaggaagcgtgccacatcatcgtcgacctcttctgaactagacaagaa

SEQ ID NO: 25303 - DNA, 197 bp, Glycine max
  Clone ID: 701099650H1
ctgacttctcatttggctgtccagttgacatgggagccttatggctacatggagtttgtaatgagaatccattggctccattgatacgtggcctggggctttcattatatcgtaccagtggtgacaactctgcttatatgatcatgacttggaaagttatatgctttttaacatcgatggtaagcaagttccacaca

SEQ ID NO: 25304 - DNA, 102 bp, Glycine max
  Clone ID: 701099651H1
ctgccaagcctctatctcagaatttgtggccacggaacccacaaaagtaaatatctgacccaatgttgaagtttgttcaagaactccatggagatttggaat

SEQ ID NO: 25305 - DNA, 247 bp, Glycine max
  Clone ID: 701099654H1
ctacagtgtaaaaagcaatgcctcaagtcttcccacaccaaggtctgcttttgatatcttgtcttctcccaatcttaagcccttcacattcaatgagctaaagaatgccacccgaaattttcggcccgatgtcttctcggtgaagggggatttggatatgtctataagggatggattgatgaacacacatttacggcttcaaaacccggatcaggaatggttgttgctgtgaagaggctgcaacctg

SEQ ID NO: 25306 - DNA, 253 bp, Glycine max
  Clone ID: 701099655H1
cctaattggaagattgaagaaggagtgattgtaatctggaaggatgaggagtactattgttttacgattgggaagacgtgcgcgtattccattccaacgagcattagcaacgcagagtaacactaataagctactggtgtttatcgctctccctcgctgcctcagcgcaacgcggtcgtttcactttcagcgcaattcaccgtttggattctccagcgggcatgggcaacgcaggagcatgttcatccaaacg

SEQ ID NO: 25307 - DNA, 250 bp, Glycine max
  Clone ID: 701099656H1
ctcaaattgatttttcttgggcgcagaggttaggacaatgttgtaacgttgttagtgttttggttgtaaccaaattttgggaatgtaaacattactttatcgttttatatgcttatgctccaaaatgaaaattgtagctttattttccaaaaaaaaaaaaaaaaaaaaaaaaaaattaaaaataaaaagctttcgggggccccccatttgtgcatcccccgccccggaaattttttgggggggggcactc

SEQ ID NO: 25308 - DNA, 257 bp, Glycine max
  Clone ID: 701099573H1
agcagcagcgacagttttctacaatttgaagcaaaaacatccaacacttgacatgccagtgatcgactacgacttggcacttcttttccaaccagtgctggtgcttggaatcagcattggagttgccttcaatgtgatttttgctgattggatgatcacagtcttgctactaataattttcgtaggaattgcaaccaaggcattcttaaaaggagttgagacatggaaaaaagaaaccattataagcaggaaactgc

SEQ ID NO: 25309 - DNA, 252 bp, Glycine max
  Clone ID: 701099574H1
caaattctaaacgctattgatagtaaaatggcggattcagtgtcggtggacatggaagccatctctcctccacccgaggaacatgttgttagaactcgtcatggttgtgtctcagttgctgtgtatggggaccaggacaagccagcgcttatcacgtatcctgatttggctttaaattatgtctcctgctttcaggggacattattttgtccagaagcctgttcattgctgctccacaatctgcatatatca

SEQ ID NO: 25310 - DNA, 257 bp, Glycine max
  Clone ID: 701099575H1
cccataggttactactcttcgccttttcctttgcaattgttaccaaacaattcttgcttagcccttacaagcaagcattaacaacaatgaagaaagtagtgttaaaggtgggcttacatgatgatagaatcaagcgaaaagttatcagaacagcatctggtctttcaggggttgaatcagtttctattgacatgaaagacgagaaaatgaccttattagggaacattgatccagtgaatgcatgtgcaagctacgaa

SEQ ID NO: 25311 - DNA, 221 bp, Glycine max
  Clone ID: 701099576H1
tgataaatgaaaatatggatcggttgacattcacatcacttgtccataaatgggttgtatccccaattccccattgagcgcatcggaatcaaagtgtctctctaacctctcgtaaagtccaagggtggacgggtttaactggctagggttttgtcctcaaaattaaaactgtggaactttggttgcaaagtcatagggggtaagttgtgtttgcatggaag

SEQ ID NO: 25312 - DNA, 254 bp, Glycine max
  Clone ID: 701099578H1
ttccttttgaaggttagaagtgctacaatacaaacaatgggaggtactcagggagatgtgaagttttgggtaatgtggggagcccattttgtgtgaagggtcaagattgcccttaagttgaagggagttgaatacaaatttttggaagaaaatttgggcaacaaagagtgatttgcttctcaaatacaaccctgttcacaagaaaggttccagtgtttgttcaaaatgagaagcccatagcgagtctcttgtga

SEQ ID NO: 25313 - DNA, 254 bp, Glycine max
  Clone ID: 701099579H1
aaagaaagaaaggaaaagaaaagctctcttctttgaatatggagtttggttcagaaagatctggtcatgaagtcaaggatgagaagagaagtgaatctagtgttggagatgaagaagatcgtcgtgaacaagagattgttacgcaggagccacccctgtctactaccgaaagatccacactggatgctgggccaaatgcttcttccctaaccaaaaaggaagaggctgttgatgaacttaagttgccaaagccg

SEQ ID NO: 25314 - DNA, 264 bp, Glycine max
  Clone ID: 701099581H1
ctgacttgcagcaattcccaatggcttccgtttccaagctctcaacgccaaatccacttgcttccttatcagaagcgcttcgcccccgagattctcgcttcctcaccttcaaaccttcttccatcgcttttaatcacaaaactaacctatccgcttccctccgatccattcactcgctccctcttaaaacctccttacggatcaaatgctcccaaacagatgggaatggaagtcctgcaaagaggacatgcttcatgatcttta

SEQ ID NO: 25315 - DNA, 261 bp, Glycine max
  Clone ID: 701099582H1
atttatatctcttgagaaatggcacaagaaacctttctattcacatcttcatctgtaaacgagggtcaccccgacaagctgtgcgaccagatctctgatgcagtacttgatgcgtgccttgaacaggaccctgacagcaaggttgcctgtgagacatgcaccaagaccaacatggtcatggtcttcggagagatcacaaccaaggccaacgtagactatgaaaagattgtccgcgacacatgccgcgaattggattcatct

SEQ ID NO: 25316 - DNA, 260 bp, Glycine max
  Clone ID: 701099585H1
aagtgggtctatatcacctgaccttaggaagctagagaatctgagggttcttgctcttcataacaacaacttctatgggacaattccatcagaattgggaaattgcactgaattggagggaatatttttacagggtaattaccttagtggagtgattccaattgaaataggaaacctttcacagcttcaaaatttggatatatcaagcaattccctcagtgggaatattcctgcatcacttgggagttgtataatctcaa

SEQ ID NO: 25317 - DNA, 111 bp, Glycine max
  unsure at all n locations
  Clone ID: 701099586H1
ccgacaacaagtccttaccctctttgcaactacccttccgcaccacagatatcagaaacgccgcntcttccgtttgcaccgcttacgactactatctccgttttgctcaac

SEQ ID NO: 25318 - DNA, 238 bp, Glycine max
  Clone ID: 701099587H1
acaccacatgaggcactcagagagcatttgttgatttggatttggaaggtttttccactctggttacgggataaacttaacttccttgcttctctccttattttccacattgtataaatgataattcagggtacttggtagtagtggtgcttgacaaagatattgaagatgggaattttgagtactattgcaagcttttttggatttggagtgggaacttcaattgggctagtcattg

SEQ ID NO: 25319 - DNA, 116 bp, Glycine max
  Clone ID: 701099588H1
cggctcgaggaattgttgtaactttttgattcctaaattctctaaaattcgagattctaatttcgttaggggaaagagattgtttgtgtgtgagtgagtatggctggaaaaggcga

SEQ ID NO: 25320 - DNA, 255 bp, Glycine max
  Clone ID: 701099590H1
gcctcacagaggttaggaagaatggcacctgtgcttggttgaggccagatggtaagacacaagtaaccgtcgagtactacaatgacaatggtgccatggttccagttcgtgtccacactgtcctaatttccacccaacatgacgtagatgtgagccatgatcaaattgctgcggaccttaaagagcatgttatcaagcctgtcattcctgagaagtaccttgatgagaagaccatcttccacttaacccttctgg

SEQ ID NO: 25321 - DNA, 254 bp, Glycine max
  Clone ID: 701099591H1
cttctctctttcaccaatcaacacaaactaagttcttccttctgatgaaagcgatagcaatggccacgaatccaatcgaagcggggaacggcgacgctgctcccaaccctaacgcgactaccaaatcctccgtgtacctgcaagactcggaggagctgaagcgagtcttcagccgcttcgacgccaacggcgacggcaagatctccgtctcggagttggacaacgtcctccgctccctcggtccggcgtcccgc

SEQ ID NO: 25322 - DNA, 249 bp, Glycine max
  Clone ID: 701099592H1
cagagatagaccaataatctgaatctgaaacctccgtgttggtgttgcatatccaaaccctaatttggaaattgaattgttgaagggaagaagatcaagatggttctggcggagttaggtgggagcatttcgcgtgctctccagctgatgagcaatgcgacagtaatcgacgagaaggtgctcaacgattgcctcaacgacatcactcgcgctcttcttcaatccgatgttcaattcacttgtccgcga

SEQ ID NO: 25323 - DNA, 253 bp, Glycine max
  Clone ID: 701099593H1
agacgccgacgtggcggagctggagtccatgacgaaactctacataagacccggcaacgagcggatcacgtacgatgatttcatggcgctgcacgagtcgctgggtgagacctactttgggttggtccatgtcgaggatggccagcagcaaggttcgatgctttaggtctcgaataaggtgagcaacctgagcagaaactgcgatttgggagtcatggtactcaatggatatcagtggaaatgctcgccgtcc

SEQ ID NO: 25324 - DNA, 210 bp, Glycine max
  Clone ID: 701099594H1
ataatatctttgcaagactgaggctgagttgaaagaagcttggcgtcctggagatcttggttacggaactagagttcctggtgacatgctgattgtcacaattgtcttctgttactctgttattgctcctgtgataatcccatttggtgctctatattttggcctaggatggcttgttttgcgaaatcaggcactcaaagtctatgtacc

SEQ ID NO: 25325 - DNA, 236 bp, Glycine max
  Clone ID: 701099595H1
agatattcaaggatctggtgccccttcttccttcttgtgttgggaccaattctttaatgagcgagagagagagggcgcaatagtagccatagccataatttattgttattatttagggatgagtgaagtgaatgaatgaaaacaaaaacaccgccatcgctcttgtctctcacggttgactctgcggttcttaatctctccgacatctccgatctctcccatgtccctgatcacat

SEQ ID NO: 25326 - DNA, 252 bp, Glycine max
  Clone ID: 701099596H1
gccgttgaggtcaccggtggacctgaagttcccttccatcctggaagagaggacaaacctgagccaccaccagacggtcgcttgcccgatgccactaagggttctgaccatttgagagatgtgtttggcaaagctatcgggcttagtgaccgagatatcgttgctctgtctgggggtcacactattggagctgcgcacaaggagcgttctggattcgagggtccctggacctctaatccttattttcgacaa

SEQ ID NO: 25327 - DNA, 264 bp, Glycine max
  Clone ID: 701099601H1
cgcaaaccctactagccaggtgtcggttatagggaacttggtgtctgctcaagttgttgcagaaattggttggaaagagagtgcagttttaatgttctcactcggattggtatattatctaattatatttgtaacgctgatcagcgactgacaagtggcagccagttccccacagtgctaaggccaacttacttgttgttttttgctgcaccaagcatagcaagtctagcctggaaatccatcacaggtgcttttgtcacccca

SEQ ID NO: 25328 - DNA, 104 bp, Glycine max
  Clone ID: 701099602H1
gttccttaagctccttagtgctgctccttgcagctctaattctatacgcctcaagttcttgcaaactatgagcatcccccagtgtacaagcctcccactgagaa

SEQ ID NO: 25329 - DNA, 103 bp, Glycine max
  Clone ID: 701099605H1
cctgcgtcctcaaaacgcctcaaggtgaatccagaggctcagccaatgaagggaaatctgaacaccgtgaagccgaaaatcccccagatggtcaattttggtc

SEQ ID NO: 25330 - DNA, 254 bp, Glycine max
  Clone ID: 701099606H1
ctgagggcaaggtcctggagcaaggaacctatgctcaacttaggcacaagagaggtgccttcttcaaccttgccagccattaaaatccaaacttaggtaatgtaaattattattttcatgtacaaatttgagttatggaggaatgtagcattgtgagcttgcttgggacaattgcttcctgcacctctggactttcttcctgaaccctactttggaacgtaaaacttacattccagattagtcattctggaaag

SEQ ID NO: 25331 - DNA, 251 bp, Glycine max
  Clone ID: 701099607H1
caccttcttcaattctcaatcttcttcttcttcgagaagccgctggagttacgatactctcaagaatttccgtgagatctctccgctggttcagaatcacatcaaacgggtttattttacgttatgttgcgcgtcgtggctgctgctgttggagcctttcttcatgttctgtggaacattgggggttttctcaccacgttggcttccattggaaacatggtttggctgctatctacaacccctgttgaaga

SEQ ID NO: 25332 - DNA, 255 bp, Glycine max
  Clone ID: 701099608H1
ctttcactggaatcacaatcctgaaacaacaacatcttagcatttatcatactactagacaacatgaacaccacattggaaagcggtttctcggcagagcgagaagctctggtggtgaagtcatcggatgtctgacgagattactggagagttgggtctcaagatgttcttgcagatgatttgagattgctccatcagctcagaaattgttctcattacatgagagattcaacggttcctttggagcaaaatccc

SEQ ID NO: 25333 - DNA, 256 bp, Glycine max
  Clone ID: 701099609H1
cggctcgagagaaaaatctacccaggttcgaacagtttgcaagcctttaaaatctgttggaatacatacagtgagtattcatccaggtgcttccttagatcatcagattcaaggtctgaaaacttgtgagcctggtttcttgtttctactcctgagaggctattggagcttgtttctacgaaggcaattgatatttctggggtatccatgctggttattgctgggcttaatactatctgtagtgctggccacgctg

SEQ ID NO: 25334 - DNA, 259 bp, Glycine max
  Clone ID: 701099572H1
ctcgagccgcttgagccgttgctatgtagctgccactagtactcatcctcatcctcaacctcaagtctctccgtaattagcacctcaactcagattaagacaacatcatcgctagtttgctagctgctaattaacacccattaattcttgttggtcaatactaaacagtactaaacatgggtgtctgctttgcttcgctcgctcgccaccaaacaccctctaaatccattccctacgcaggttcgggcgtgagtccttg

SEQ ID NO: 25335 - DNA, 230 bp, Glycine max
  Clone ID: 701099532H1
ctggtttttttctagataggggttgcactttttaaatcagaactagcccaagacccaggtacagaaagtactgtgttagttaaaaaaaaaaaaactttcatcaattattatcaactttattcggaagtgtagccttgtaggtgaactatgtgtcaggattttgaagtttgattctctttaatattgattgaatagttgtgtgtagaaactagaaaggttagtgattatta

SEQ ID NO: 25336 - DNA, 263 bp, Glycine max
  Clone ID: 701099534H1
ctctctactactgctagctgtgacttgttttgagttcgatccaattgcattggtatgtggaatcaggaaagatggttagcgtagctgagatcaggcaggcacaaagggcagaaggcccagcaaccatccttgccattggaactgcaaacccaccaaaccgtgttgatcagagcacctatcccgattactacttcagaatcaccaacagtgaccacatgaccgagctcaaagagaaatttcagcgcattgtgacaagtctatga

SEQ ID NO: 25337 - DNA, 110 bp, Glycine max
  Clone ID: 701099535H1
aagctcttggctgagaagacgaagaagaagctggaggaagctgcacattcatttagcgttgatggcgtcatcaaccatccatccccggtcaaacgtgatgtgaagtggaa

SEQ ID NO: 25338 - DNA, 260 bp, Glycine max
  unsure at all n locations
  Clone ID: 701099536H1
cgctgatctcagcaggaacaatagcagcgagagcagaatcgacagcgactcaagnctgcttccgaggcttgacacgtggtacaaatccaaggacgtatcgcagaggatccttctctcacttgaatgccaaatgaggaggtgttcctacacgcaggttttgggtgagccgaacctaccgggcaaaccgtccctgctctacgacctcgtgtgtaagccgaacgtgatccacgcgctgaacgacgagcgtcgatgtagcgcgt

SEQ ID NO: 25339 - DNA, 258 bp, Glycine max
  Clone ID: 701099538H1
cacagatcaattgcaacggttgaattttcactgaagacaaagttacaaaaaaaaaacatgtcttgctccgtcgcggtttccaattcgccggtgttctctcattcttcttccctcttctgctcgaagccctccatcatctcttcttcgccggaatccctctccctctctctgtcgcatctcaaaccttcgaactcttctacgtcgtcgtcttgttcttcgccttctgctgctgctggttcttcttcgcctcttctccgt

SEQ ID NO: 25340 - DNA, 260 bp, Glycine max
  Clone ID: 701099539H1
cggaagagcatttggctgtcaagcacttctcagttgagggacagttggagtttaaggctatcctctttgttcctaagagggcaccttttgacctctttgacacaaggaagaagcctaacaatattaagctttatgtccgccgtgtctttatcatggacaactgtgaggagttgattcctgagtatttgggctttgacaagggtattgtggattccgaagatctaccactcaacatttcaagagaaattgcaacagaacaa

SEQ ID NO: 25341 - DNA, 116 bp, Glycine max
  Clone ID: 701099540H1
ctagatcgcgaggttcgccctttattattttgatgagtactgtaccttgtttagacggtaagaagactctgagatatttcgaattccacaagcagctaaagggttttagtccattc

SEQ ID NO: 25342 - DNA, 261 bp, Glycine max
  Clone ID: 701099543H1
atcaactttgtgtttctctcttcaccttcgtctttctctcatttcaattcttatgcggttcacaaactctgtacagttaatcaagcccaacctcacctcacctcacctcacaggttttagttgttaattaaatatatagatagaaatccaaggaagaagatgaagcagtttgccgtccaaaacgtcgtcgctccatcccacgatgagattagcgtggtttgccccaagccccgccgcctcggcctctcaacttccccgtga

SEQ ID NO: 25343 - DNA, 254 bp, Glycine max
  Clone ID: 701099547H1
ctctcactgatagccagaaggtttatgtagattcattggtgaagcaagcatatgaaaattgggatcaggttgtggattatgatggcaaatcactcgtgaatgctaaaatttcttctgaaaatgaacttcatgtggagtcaattgattatggtagtggtttagatcatcaactgcaactgccggtccttccagtgtctgttccttctgaacagcaaatcaattcagggatacctgttggagttacaacgataata

SEQ ID NO: 25344 - DNA, 246 bp, Glycine max
  Clone ID: 701099548H1
caagaacttgttctactcttttatcctacgcactcctcccttcttatcctgcgcatctttcaccgagatcctccccttcgcatcttcactttccaccatttcagtgggaaagaatcatgagttgtttcagctgttgcgaagaggatgaactccacaaggctgctgaaagtcgaggaccatacgtagtaaaaaatccagcaggaaatgatggaaattatcttgcttctgatactgcaaagcaggaac

SEQ ID NO: 25345 - DNA, 256 bp, Glycine max
  Clone ID: 701099550H1
ctggtggatctcaaattgtgaaccgcacatatacccaccctggttcacaagctacgtctatctcacgttctctctctttctactgtcttgctgaaactgtgagtctatgttatttgtggcggagatgaactcctccaccaacacctcgaattctcagtcaatggctgcagcagccagtgatgggtctgggaagaaggtaagaaaaccttacaccataaccaagtccaggtgacgtttggatgaggcagacaggaca

SEQ ID NO: 25346 - DNA, 258 bp, Glycine max
  Clone ID: 701099551H1
ctctactgctgatgacagctacgaattgaagaacaagcttagagaactcgagatttcgttgttggggcctgattcagacattgttgacagttgccactgctcctacaacggtggtttccacggagcatctccaatggctaaatacaattgggatcagattgtggaaatgattccaaaattaaacttgaaagaagtcctcattcggtgtgcacaagccgtggctgatgatgatattgaaacagcagtggatttatgaac

SEQ ID NO: 25347 - DNA, 261 bp, Glycine max
  Clone ID: 701099552H1
cggaagccttcccgtcaaatggacagccagaagtgacttcagcctggcaaaccccggcagcagagcctgggaaagctgattggcaattggcattggtagagactgctagcaatttgtcaaagcagaaggcagctttaggtggtgggttggatcctctattgttgactggtatgtatgatcaaggaatggtgaggcagcatgtcagcactacccaactgagtggtgggagtgcaagcagtgtggcatgccgggaccagggaa

SEQ ID NO: 25348 - DNA, 261 bp, Glycine max
  Clone ID: 701099553H1
cggctcgagggaggaagctttgagagagagagacggaggagggagagtgttgacgctccatcaacgatgggtatttctagggattccatgcacaagaggcgtgccactggtggcaagaagaaggcatggagaaagaagagacagtatgagcttgggcgtcaggccgcaaacaccaagttatcaagcaacaaaactatccggaggattcgtgttcgaggtggcaatgttaaatggagggcattgaggttgataccggcaatt

SEQ ID NO: 25349 - DNA, 248 bp, Glycine max
  Clone ID: 701099554H1
cttttggatgactttttgctagagaagcaaatgaatgaaacgacagttgaagtgcgtgaaatagaggtgttgaatgattctggaccaagcaattcctcattgctaccatttaaagatgacgaagaagtggacattggtggagatgaacaccctgtgtcgagttatcctcctgtggagattgtgaaggaggaaacttgtaggatgatcacctctgttagacctcgaggcagtgttacagacgctcctgt

SEQ ID NO: 25350 - DNA, 256 bp, Glycine max
  Clone ID: 701099557H1
gaccgtgatcatagcttctggagtttgtcgtggatgcagagatgctatttactttggccttgctctcttatcactctcatggtgtagcaagaacatgaataacttggtcctatctcttgttcctaaattcgcaaaactgcaaactctaatcctccgtcaagacaagcctcaactagaggataatgctgttgagactattgcaaaatgctgtcatgaactgcagatcctggacctcagcaaaagttcaagctaactg

SEQ ID NO: 25351 - DNA, 251 bp, Glycine max
  Clone ID: 701099559H1
tctaaatctcgtccagtactgttgaattaataatattatcattcttacaatatgaaggtatagtctgtgtaccaatttgattagaacctctcttccttctttagataaatgttttccaaaccaatgatgatttttgctccaaattctatctctcaagtagacaaaaatagattttttttcttcttaccaatcatagaaggaatgccaagttattttcttgtccctaggcactctgttactcaatttagttg

SEQ ID NO: 25352 - DNA, 256 bp, Glycine max
  Clone ID: 701099560H1
aatcgagccgaatcggctcgagcggctcgagaaggcatatcttgcactgagctcctattggaatctgttttggtgacggaaaaactgagcatgaaaaccagaaaggaacttctactggatttaaattaatgctttctaagctcttcccaaagctagtagaggcattttctgacaagggaattgattgcagccagtttgctgagatgcataagtaactgtctgttctaccttgttgtgaataacatccagcttcctg

SEQ ID NO: 25353 - DNA, 253 bp, Glycine max
  Clone ID: 701099561H1
ctaaagtttggcaagcttattgaggcaaaggtggttgttgacaagttctctgggcgttctcgtggttttggatttgtcacatttgatgacaagaaagcaatggacgaggctattgatgctatgaatgggatagatttagacgggcgaactattactgttgatagagctcagcctcaacaaggatcaactagagatgatggtgatcgttaccgggagcgtggtcgtgatcgtgatcgtaacgagattatggagg

SEQ ID NO: 25354 - DNA, 250 bp, Glycine max
  Clone ID: 701099562H1
ctgaagaaagacacagccattgtttgtttactttccattgattgagcgaaagctttgttttttctgcgatcattttccattgggtggaagaaagtctcaacctttagtcgaaagagcaaggatctgagtgagtgagcgatcatgtgtggtggtgcgattatctccgacttcattccagcgggtcccgccggcggggcgcacgcgtgaccgccgacatcctgtggccgaatttgaggaaggttctcgaagt

SEQ ID NO: 25355 - DNA, 94 bp, Glycine max
  Clone ID: 701099563H1
cctaatgatcttgtaaagagaagaatttctggtaaaggaccaatttgttcccaatggagttcgccttttgattgaggactaatccttatgcttc

SEQ ID NO: 25356 - DNA, 255 bp, Glycine max
  Clone ID: 701099564H1
ctcactctgaatccgccattgggctgcgatggcgaagaagcgaaagtcggtggcaacgcgccttgacgaagtggatcgaacgatgtactccactttctgcagcacagcccaactccctctctcatctctacacccacgccatgaaccaacaaaaactctcatttcaggccggtgaacgacacgctcttgagaaattgtatcaatggattctcaggcaacagcaagaaggatctagggtggcccattgatattgtt

SEQ ID NO: 25357 - DNA, 262 bp, Glycine max
  Clone ID: 701099566H1
ctctctactactgctagctgtgacttgttttgagttcaatccaattgcattggtatctgaaatcaggaaagatggttagcgtactcgagatcaggcaggcacaaagggcagaagggccagcaaccatccttgccattggaactgcaaacccaccaaaccgtgttgatcagagcacctatcctgattactacttcagaatcaccaacagtgaccacatgaccgagctcaaagaggaatttcagcgcatggtgacaagtctatg

SEQ ID NO: 25358 - DNA, 202 bp, Glycine max
  unsure at all n locations
  Clone ID: 701099567H1
tgcgcttcagcacaatggggtgctacaagtatgtttcggagctatggcgcaagaagcagtctgatgttatgagattcttgcagcgggtgacgtgctnggagtatcgccagcaccattctatgtcgtttgacacgtcactcgccagataagtcgtcgcatggttcaagctagcaggtacgtgatacgtgtcgctacgaggtgc

SEQ ID NO: 25359 - DNA, 258 bp, Glycine max
  Clone ID: 701099569H1
ctcgagccgtctcacgtttttacacacgtagacacatacacattcataattcattgctatacccacacaagcctagctcctcatatcataccactgatttatcttccctctccatcgttcgttcattcattcactctgggcgcgcgcacgtgctaggaaccatcgattcgagaatgggcaacgactgtgtgccgtcgacggcggcggcggaggtcatggcggtggtggccgttgacctcactgacctccagctggtgg

SEQ ID NO: 25360 - DNA, 259 bp, Glycine max
  Clone ID: 701099571H1
attcttctaagctctactaaaaaaagatacatagaaacaatcgaaattatttattattattaaagcaacatggttttgtcatggacaaaagggagagtgttccggcgtgcacgaaagggtaaggagttgaaatattctggtggcgacatggagatagagattgcgatccccacccacttccggtgcccggtaaccttggacatgatgaaggaccccgtgaccgattccacgggcataacctatgccgcgacagcatcga

SEQ ID NO: 25361 - DNA, 257 bp, Glycine max
  Clone ID: 701099530H1
actgcatattgattacccaatgttgtttgaactccgtaatgatgctgccgagcgggtttctcattgtggggttctggagttcattgctgaggaaggcatgatatacatgccatactgggtaggcattcaaaaatgatggagaacatgcttttacaagagggggacattgtcaaagtgaaaaatgtgacacttccaaaggggacatatgttaagttacagccccacacaaaagactttccagaatttccaatccaaaa

SEQ ID NO: 25362 - DNA, 253 bp, Glycine max
  Clone ID: 701099501H1
ggcaaaccctactagccaggtgtcggttatagggaacttggtgtctgctcaagttgttgcagaaattggctggaaagagactgcagttttaatgttctcactcggattggtatattatctaattatatttgtaacgctgtatcagcgtctgacaagtggcagccagttccccacagtgctaaggccaacttacttgtggttttttgctgcaccaagcatagcaagtctagcctggaaatccatcacaggtgtt

SEQ ID NO: 25363 - DNA, 119 bp, Glycine max
  Clone ID: 701099502H1
ctgaaagtcagacaaaatactgatcaaagagcataatgtcagggatcattcacaagattggcgagacccttcatgtgggatggcacaagaaggaggaggagcataagggtcagcaccat

SEQ ID NO: 25364 - DNA, 257 bp, Glycine max
  Clone ID: 701099504H1
tctctgttttctttcattcccattcttagttttccctgccattcaaattttcacatgacctctcattattattctttttattattattagttcttttttgtttccatcaccaaccaacctctcatctttggatggtgaattccccatctgagttcctttgatctcttcgccttctctcaatttcttcttctctgatcccagcaaagaaaagaaaaaaaaaacaaactaaaaaaaacattagaaacaattgttttttt

SEQ ID NO: 25365 - DNA, 268 bp, Glycine max
  Clone ID: 701099505H1
actcgagccgattcggctcgagcacacatcaccaagctgtatcaagaccatcaatccctcaacaactccaccactagcagcaacactcgatcctccagacaagagcaaaactatccacacccacaagaacacgacgaagaatgcttcaactttttcatggcagatgaagacttatcctcgtcttcttccaagcactactatccctatcaaccccaccctccctccactaccgaccattccttctcccccactccggcgtcgacgttgt

SEQ ID NO: 25366 - DNA, 265 bp, Glycine max
  Clone ID: 701099506H1
cagaagctagtttccacgattttcggatcgacaagtcaaaagagcgatatttcactcaccagagaagaaccacaacaatggcggatcaactcaccgatgaacagatctccgagttcaaggaagccttcagcttgttcgataaggacggcgatggttgcatcacaaccaaggagcttggaactgttatgcgttcattggggcaaaacccaactgaggcagaactccaggacatgatcaatgaagtggatgctatgggaatggtacc

SEQ ID NO: 25367 - DNA, 264 bp, Glycine max
  Clone ID: 701099507H1
acatggcggaagctcaaccagcttccgctcttccctcaggtggccaatgttgtgttgtccaaggctgcctattgcaccgagaagtacaacatcccggttgtttcctctgctgagaaaggttacagggtttctgcttatcttcctttggtgcctactgagaagatcgccaaagtcttcggtggaaactgatctcgatctattgcggttttgaatttcttattgtttttactttctctacaaagtgttgtgctagttgctactgtt

SEQ ID NO: 25368 - DNA, 264 bp, Glycine max
  Clone ID: 701099508H1
caacaattagttaagagagttgagtaagatcagaatggcagacttgatgaaaagaatcctccaaatgattgaggctgaacaagcaagcaaagggtccaaccatggttcttcaaactcacataacactctatggcagcggaagccagaatggatcaaccatcaacagtggcaatcatcttaacaacggcaacaggtatgacgactcataccactacggtgaacgccctatttataacagtggcactttcatggtaatggcaacgg

SEQ ID NO: 25369 - DNA, 263 bp, Glycine max
  Clone ID: 701099509H1
cagagatatttttttattataaattcaaactaataataataatgccttcttctcttcactttgataggttcaatcctatcacccacgccgccaccactgtcgccatcgccaacggcgtaaactgtccgaagcagcctcaagcgccgccctcttccacggcggcgcgtcgcctcgtggttccctctctctcttccggcagagcaatcgcggcccccgacacggtggcgctccaccacgcgcacgtggtggccccaaccagtgct

SEQ ID NO: 25370 - DNA, 257 bp, Glycine max
  Clone ID: 701099510H1
gcttgtgctgccttcgtttgcgtttttatcacagaggaattaacatatatatagcaagcatggcagtcacactctacgaccttagctcttcctctgggttgaacaaacttgatgagtaccttctcccacgcagttacatcaccgggtaccaagctacaaaggatgatcttactgtttatgcagctttgccaactgctccatcagatgaatatggaaatgtttccaggtggtacaagcacattgatctttgttgagaa

SEQ ID NO: 25371 - DNA, 116 bp, Glycine max
  Clone ID: 701099511H1
cggctcgagaattgaactaattgacctagcaaacttctcattaatcgctatagtgctagtgatcaattgcaattttgaataataatgactttctattcactacgttataacgtgtt

SEQ ID NO: 25372 - DNA, 259 bp, Glycine max
  Clone ID: 701099512H1
catacacacactcaaatacatacactagtagtgtggtgtgtgcccttcctttatccttttgctttttgtgtgcaattaacacacactcacacaaaaatgacggcatgccaagattggccagagccagtgattcgagtccaagccttggctgcaagtggcttagccacaatccccgaacgtttcataaagcctaagtcccaaagacccactaatagtaacaattatgctccaaagaccaattccttcaaattggtcatca

SEQ ID NO: 25373 - DNA, 255 bp, Glycine max
  Clone ID: 701099513H1
gttgtaagactttgtaattgaggtgctgcaatggcttcaagtcaggaagaggtgactcttttgggagtaattggaagcccatttgcttgcagggtgaagattgcccttaagttgaagggagttgaatacaaatatgtggaagaaaatttggccaacaagagtgatttgcttctcaaatccaacccagttcacaagaaagttccagtttttattcacaatgagaagcccatagcagagtctctgtgattgttgagt

SEQ ID NO: 25374 - DNA, 257 bp, Glycine max
  Clone ID: 701099515H1
ggtgaatttgtctgccctagagcgccttgttagtaggtgtcccaacctgcagactctccgcctcaaccgtgctgtgacgctagacaggcttgccaaccttcttcgcggagctcctcaattggttgagttaggcacgggaacctacacgactgagatgcgaccggaggtcttcacaaacctggcggaggcattttctgggtgcaagcaattgaagggcttgtctggattttgggacgttctccatcctaccttccagc

SEQ ID NO: 25375 - DNA, 88 bp, Glycine max
  Clone ID: 701099516H1
cagagacagagacagagagagaggatgggttgttgccaatcatcgatgttgctgagagtgggagagagggagactcaccctgaaaagg

SEQ ID NO: 25376 - DNA, 262 bp, Glycine max
  Clone ID: 701099517H1
atttggttttggtttctccgaccttgaacgcttcccatcttggtgagtaacacgaatctgaggaaaaaaaatgtcgattatgcaactttacgggcgcagaagagcgtggtgaagcggtcgaagaagtacttggaagaagcgctttacatgaagctcttcagagatggaagctcccagctcatcgttcgccagagcctcaacaacttcgtcaagagccggaagcgcgtttacagatgggacgtaggcgacactcaagaagctt

SEQ ID NO: 25377 - DNA, 265 bp, Glycine max
  Clone ID: 701099518H1
ggaatggtcatcaacgtggccaccctattggccgggaccgttacaaacccttgggggaatggctacttccaaggacccaaagaggctcctctcgaagccgcttccgcttgcacagggctgtacggcaagggcgcttaccctggctacgctggggaactcttgctggaccccactaccgccgctagctacaatgctaacgccgtcaatcaccgcaaatatttgttgccggcactctttgaccctaccacttcgcttgttctactct

SEQ ID NO: 25378 - DNA, 265 bp, Glycine max
  Clone ID: 701099519H1
cttctttgtttcttattgagtttttggcttctcacttctttttttctttcacactctcaacgaagtggtttataacagtgtttaattgaaattccaaacatggattgggttcgaggagacgctgtcggacgaggaagctttgctaccgttagtttagctattccaacgacgaattacaatcagtttccgtctctaaccgtggttaagtccgctgacgctcaaacctcgtgctggctcagaaacgagaaaacgtgctggatcgcct

SEQ ID NO: 25379 - DNA, 247 bp, Glycine max
  Clone ID: 701099521H1
caaattcttattagaacgaaaaaagaaaagaaaagaaaaaagagcgatttttccctcaccaaagaagaaccaaaacaatggcggatcaactcaccgatgaacagatctccgagttcaaggaagccttcagcttgttcgataaggacggcgatggttgcatcacaaccaaggagcttggaactgttatgcgttcattggggcaaaacccaactgaggcagaactccaggacatgatcaatgaagtgga

SEQ ID NO: 25380 - DNA, 264 bp, Glycine max
  Clone ID: 701099522H1
ccagttctggttcctgtcaacgccacaagtaccgggctagaaagtgctggtctggacaacataacttcgagtgacattgataaactctcaatttcaaatgtccatagtacatctgaaaggtttctaaaccatcatgctgtgctgttacagttttgctgctgaatctttgtgttatttagtgcattagtttctaatccaatattgtagctcagttggcaacatgtgctgagtttgtggagaaggacctggttcgatactcgcaaa

SEQ ID NO: 25381 - DNA, 261 bp, Glycine max
  Clone ID: 701099524H1
attggaaccccttgagcaggttaacgtttcaaaccattcgaatgcaagccttgaggttggcgtatctcctccttccctggtggttggtgttttcgacagcagaatcggcgtgcaaggagggctgtggagtggcactaggctcctactacttatggcggggctccaacctcacctacatctcctccatcatggcctccagccttctgacaactccggacgacatagtcaactacaactacgacaccgtcccagcaaggacat

SEQ ID NO: 25382 - DNA, 259 bp, Glycine max
  Clone ID: 701099525H1
cggctcgagcggctcgagaaaaactacatcttagctgagagagctgagactttgttgttttgattgaagcaacgatatcctgaactttcacaaacatcattggacacatgcaaaattcaatacaaccaggatgcaggaaaagcgatattagaaagctactcaagagtattagaaggcttagcattcaacattgtagcttggattgaagatgttcttcttgctgataaatcaatgacgaaccaaaattataggaatcgcg

SEQ ID NO: 25383 - DNA, 256 bp, Glycine max
  Clone ID: 701099526H1
cagttcattaaactcgttttttgctagaagcaggaagataagagaaacaaacaaaccacaaaataatcaattgagctacttactataagatttagatctcccaacagagagtttcacaaaattgccaagtacccttttcaggatcaagaaagagaatcaaaaaccaacaaaaggtgttgttcattgttgtagttgtttgtaactgtagcaacaggaagatggttggaaagttggttgtggtgaggtgtgttggcca

SEQ ID NO: 25384 - DNA, 262 bp, Glycine max
  Clone ID: 701099527H1
actcgagccgctcgagccgattcggctcgagggaagtgataagtgctaaaacagagtttcgaccgaatctacactaaaaccctacgcacacatcttggagtaagtccaatcgatatagcagcaatgtctacgcttgaacttgaagctcgagatgtcatcaaaattgtgcttcagttttgcaaagagaattcgttgcatcagacttttcagatgctgcagaacgaatgccaggtttctctgaacactgtgacagaattgaaac

SEQ ID NO: 25385 - DNA, 257 bp, Glycine max
  Clone ID: 701099528H1
cgcagataactccattaccttattttctccatacaagatggggaaattcaacctctctcatagggtggtattggctcccatgaccagatgcagagccctcaatgggattccattgccagcgcatgatcaatactatactcaaagatcaacactaggtggattcctcatcactgaaggcaccttgatctctcccacttcttctggatttcctcatgttcccgggatatattcagatgaacaagtaaggcatggagaaa

SEQ ID NO: 25386 - DNA, 257 bp, Glycine max
  Clone ID: 701099529H1
gccctttcttctcttcccccattttttcctctttcttcctcgcctagctagctccagaaaattaggatctgcttcagttctagtgtttccctgtcccaaatcacgagtccattgagtttgattttgtggatgaaaagcatagatagggcttttgcaaaactctccaatgtttcttgaaattatatgaccatgcgtcgaattcgtatgctgcactccttctccgtcgtgttcctctactggttcacgttttctcatga

SEQ ID NO: 25387 - DNA, 265 bp, Glycine max
  Clone ID: 701099495H1
ttcaaggaacttttggatacatggaccctgaatatttccatactagtcaattaacagataaaagtgatgtctacagctttggagtggttcttattgaacttttaactgggaaagagccaatatcttctgcacaacaacaagatcttagatgtttggcttcatatttcctccatacagagaaggacatatgaagccaaacttctaagctcttgtcgtttggcttcatatttccttctctgtatggaggaaaatcgtctttttgata

SEQ ID NO: 25388 - DNA, 266 bp, Glycine max
  Clone ID: 701099456H1
gagtcttcttccccaatatcgttagccgttagggtttacggacagagagagagggctgcgctgcagctgcagctgcacctgcagaatcttttatcagcgatagcagcaatgtcttcgtcgaaagctgcagacccagcctgggttacctgactcgcaaggacacggaggtgaagcttccgcgtccaaccagggtcaagaacaaaacccccgctcccattcaaatcaccgccgagcagattctccgcgaagcacgtgagcgtcaagag

SEQ ID NO: 25389 - DNA, 84 bp, Glycine max
  Clone ID: 701099457H1
gagaaagagagatgtctggtatcgcccgtggacgtcttgccgacgagcgaaagtcatggagcaaaacctaacctgatggtttcg

SEQ ID NO: 25390 - DNA, 257 bp, Glycine max
  Clone ID: 701099458H1
ccttgctcttgtttgttccttttattgtttctttcttgatcatgtcgcttgttggtaaaattagtactgaaattggggttcatgcaactgctgcaaagtggttcaacctctttgcaacgcagctccatcatgttcaaaaccttactgatagagtgcatgaaaccaagctgcatcatggtgatgactggcatcacaacgagtcgatcaaacactggacttgtacaatagatggtaagattacaacatgtctgccgagt

SEQ ID NO: 25391 - DNA, 266 bp, Glycine max
  Clone ID: 701099460H1
gttttgcaaaaatgggagttccagagaaagaccctctttcccaattgagtttgcctcctggttttcggttttaccccaccgacgaggagcttctcgttcagtatctgtgccgcaaggtcgctggccaccatttctctcttccaatcattgccgaaattgacttgtacaagttcgacccatgggttcttccaagtaaagcgattttcggtgaaaaagagtggtactttttcagccccagagacaggaaatacccgaacgggtctcga

SEQ ID NO: 25392 - DNA, 267 bp, Glycine max
  Clone ID: 701099461H1
atcattctcatatcctcaatcaccccccctcgcactcgctcttcccttcctctggtggcgacaatgtcgactcctgctaggaagaggctgatgagagacttcaagacgctgcaacaagacccgcctgcagggatcagttgtgctccccaggataacaacataatgctgtggaatgcactcaacttttgtcctgatgatactccatgggatggaggcacgttcaagttgacactccaatttactgaggactatccaaataaaccaccg

SEQ ID NO: 25393 - DNA, 269 bp, Glycine max
  Clone ID: 701099462H1
ctaaatcgtggcctcgtaaatcaaccaaagtgatcgaacttcacaaatcctaaaagccatggcccaatcccatggatccatcctcactcgatcagtgtggtcctccaatctggaatcggagttcgacttaatcgatctgtcatcgactccttccctctcatctcgatggacaccgagttccccggcgtcgtcgtgcgccccgatgcttgcgacccctccttccgccatcgccaacccgccgcgcactacgccgtgctcaaagccaacgt

SEQ ID NO: 25394 - DNA, 270 bp, Glycine max
  Clone ID: 701099468H1
cattcttcttctgcgttgaattgggacaacgagaaattggatctcagtttacggcaggaaataaaaattgcatttgagtgtaaaataacagagtatagtgtagggccttgttcttgatactgtgctaaatttgttggatggcggagaaatcatgcatcaagcgccttcagaaggaatatagagccctttgtaaagagccagtttctcatgttgtggctcgtccttctccaagtgatattcttgagtggcattatgtgttggagggaagtg

SEQ ID NO: 25395 - DNA, 239 bp, Glycine max
  unsure at all n locations
  Clone ID: 701099469H1
gcgacttacagcattggtgtatatggtttcaagggaattactaagtataaaatatcagtcatggtccaggataatttcaaccaaaatgttggtcagcaagcatcatcttccatgtcatctatggaactggatacgaacaatgtaggaactgcaagcattatatacccggcaggactattgcactacatgaagcttactgtagcangcacaatgttgtctgtcagcatgcaggctgtgga

SEQ ID NO: 25396 - DNA, 264 bp, Glycine max
  Clone ID: 701099471H1
cgtcgttcttttgcgtttgactctctctttctctttctgtgttcttcgatttcttatcctctcatatccgtgatctctctctgttcccttcttctgtctcatgcacacaccactgtaccttgttctcaccgaaccttcaactaggaatcgatcgagagtgtcttgtgttgctagtgcaagaggctgcaatatagatagatacgttcgtgcgtacgtaggaatcgtacgtacgcggtagtacacaagacacgacgccgttttgca

SEQ ID NO: 25397 - DNA, 262 bp, Glycine max
  Clone ID: 701099472H1
tggcaagactggttctcactttgaccctagcagtgacttgttcgttcccaatgaaagaaaagatgttattacttccacagcttgttgggctgctatgttgggattgcttgttggattggggtttgtaatgggtccaattcaacttcttaagacttatggtgttccctatgttatattcgtcatgtggttggatttggtgacttatttgcaccatcatggccatgaagacaaattgccttggtatcgtggaaaggaatggagc

SEQ ID NO: 25398 - DNA, 268 bp, Glycine max
  Clone ID: 701099473H1
ctagaatatcaaattggtctcttgtcttcctcctcatctctacactactccacatagagcccagcctctcaagcccaagcccaagcccaagcccaagcccgttcataaaatcctcctgcagcagcacccagtacccagccctctgcgtctcatccctctccgtctacgcctccagcatccaacaggaccctcaccaactggttcagacagcactctccctctccctgaaccgcacccaagccaccaaaaccttcgtggctaactgcaa

SEQ ID NO: 25399 - DNA, 265 bp, Glycine max
  Clone ID: 701099476H1
cagtaatttacataccctagttctcgtatatattcttcttctttgcatcaatcctttgtctcaaattaaaatcatgggaattgtcactactgaatgcgagcaagtttgtgccgtggctcctgcaaggctatacaaagccatggccttcgattttaacaacgttatgccaaaagctatcccaaattttgttaagagtgctgaaatcattggagacggagggccgggatctattaagaagctcgttcttgttaacggatatgtgaat

SEQ ID NO: 25400 - DNA, 261 bp, Glycine max
  Clone ID: 701099477H1
ctcgagccgctcatattaattagttagcaaagtctcactacaaacattcccttctgttacattaattgtgaccttaagcttttatattgaaccgtgtcaatggccgttcctgtgaggactttagctcttgttgctttgcttgttgccattaatgcaatggtgtgtgaaagtagagtggtaagaaaggaccttggtttggaccttggtggggtgggaattggggtgggtgctggggttggattaggccttggtggtgcaggt

SEQ ID NO: 25401 - DNA, 269 bp, Glycine max
  Clone ID: 701099480H1
tgtacgtttgggactgtgtaccatggaaaatggagaggatcggatgttgcaattaaaagaataaagaaaagctgcttcgctggtcgatcttcagaacaagaaaggctgaccatagagttctggcgggaagctgcatactttccaagcttcaccatccaaatgtggtggcattttatggtgtagttcaggatggaccaggagcaacactagcgactgttgccgagtacatggtggatggttctcttaggaatgttttgcttcgtaaggat

SEQ ID NO: 25402 - DNA, 285 bp, Glycine max
  Clone ID: 701099482H1
tctgagctcggctcgaggaagcatccagtcagttgcatgtacaaatttcagctatgccagatatcgtggtgtaaagatagggtgataatttcattcctacaggcaatgactcaggaaaagttttccccttggaagcaccatatcctattcctttgcagccatttgagggcaatttgcatgctaatatatcagatgcttcagctacagctgctatatcagaagggcttcatcctgcattaccatcatagaacaagggtaagcaccagcagtctgaagatgctcttc

SEQ ID NO: 25403 - DNA, 271 bp, Glycine max
  Clone ID: 701099484H1
tgaatttcatcgacggaacaaccacgtttaagactgccactgttgctgctgtgggtgatggatttatagctcaagacatatggtttcaaaacacagcaggcccacagaagcaccaagcagtggctcttcgtgtaggcgctgaccaatccgtcataaaccgctgtcgcattgatgccttccaagacactctctacgctcactccaacaggcagttctaccgagactcttttattactggcactgttgactttatatttggaaatgcagctgt

SEQ ID NO: 25404 - DNA, 265 bp, Glycine max
  Clone ID: 701099486H1
cgaactttcgtttgcggcaaggcaaatctgcattgcgatggcgcctccgaagctcttcgacctttgcgctctttgtaaccctaattttcgccatcgttggggccgaagacgatatttccatcgaaggaagcatccagagcctgatacctccgccatcaggatccaattagatcaactcaattccaagatccaaattctcgagtctcaaatcagcgaaaagttggaagaagtgaagaagaaggacgaaattatagcagacaaagaa

SEQ ID NO: 25405 - DNA, 267 bp, Glycine max
  Clone ID: 701099487H1
ccgtttttctcttcttcttcttcttcgcataatagcagcacaaatggtgaagcactacagacccccggggaagaaaaaggagggaaatgctgccaaatttgtcattaggtcacaagcaatcaagcagcttcaaatcagtctaccccttttcaggaaactatgtattttgaaaggtgtaactccaagggagcctaagataaagttcaagggaactcatcagacttattaccatgtcaaggatgtttccttccttcatcacgagccttt

SEQ ID NO: 25406 - DNA, 266 bp, Glycine max
  Clone ID: 701099488H1
atcactttatgactccctcagaaacgcaaatcataaaccgccaaaactcgttgacctagactacaacggcgttgaagaccaatcctcaacacaagaacaaatatcaaccaatctcaacaccatgtaccggcactggtgtcaagttcaaagactccaacgctcttcttcggtagcccttaccgtgcaggagaagatagtgatcccggtggtggcactgtggagaacattcctcacggtccggtccatatatggaccggtgataacac

SEQ ID NO: 25407 - DNA, 258 bp, Glycine max
  Clone ID: 701099490H1
cattaccataacctccgacacccgacccctaatcctcttcgagaaattcgggttcacctacccaggccgtgtggcgatcgcggcgtcgtcggtggccgtggtggcgccgtcatcgcaaccgaacctctcgcggctagggttcttcctaataagcgaaaaatcccttccccaatttataatagaaatggaacaaaaccctaccttctgcatcctcaattccccttacacctctcaactcttgcacttcctcgatcttcc

SEQ ID NO: 25408 - DNA, 259 bp, Glycine max
  Clone ID: 701099491H1
ttcctttggttttactttatctttcttccaggaaagtgatgagaatatatacctttttttgcgttttataattttcttttcctttgttctcctttttttcctctcttctgccctccacacaacttctctcccgtctctctctctctacaaatcttctttcttctcttcgctgctcactgtagcgtagcatggctttcagagttggaggagcgggaggaggaaatgcctcttctggcatgggtgttgctgagcatagcgt

SEQ ID NO: 25409 - DNA, 168 bp, Glycine max
  Clone ID: 701099492H1
gtagaaacttaatcgatcatcacttcacttcactaatacatcatggcagacgagacccagcatcagtatgacagctctgctgtcgaggtccacgatcgcggtgtttttgagtttctcggcaagaaaaagatgcagacgataaggctcatcctcaggaggacgtcatcg

SEQ ID NO: 25410 - DNA, 264 bp, Glycine max
  Clone ID: 701099493H1
gtcaattccaacaacaccacaatgggaagaagaccggcgaggtgttaccggcagataaagaacaaaccgtacccgaaatcccgtttctgccgcggcgtgccggagccgaagatccgaatctacgacgtgggaatgaagaagaaaggcgtggacgagttcccgttctgcgtgcacctggtctcgtgggagaaggagaacgtctccagcgaggctttggaggcggcgcgcatcgcatgcaacaagtacatggccaagttcgccgga

SEQ ID NO: 25411 - DNA, 145 bp, Glycine max
  Clone ID: 701099494H1
cgggttgtttcgttgttgtggatctatgttgtatcctctttctcccacaaaatttagtgacatactgaatttggtctgatatgacatgattttgattttgctgagtctctgattggtactgttgcatggacagacgccaactgct

SEQ ID NO: 25412 - DNA, 270 bp, Glycine max
  Clone ID: 701099455H1
ctagaactcacaaaggacagaagaaacgcgaatgccaggagaactccaattaccacccgggttcagattccaccccactgacgatgtgcttgtgaatcactacttgtgtagaaagtgtgctgcacaaaccattgctgttcccatcatcaaagaaatcgatttgtacaagtttgatccatggcagcttccagagatggctctttacggtgagaaagagtggtacttttgctctcctcgagaccgaaaatacccaaacggttcgagaccgaa

SEQ ID NO: 25413 - DNA, 273 bp, Glycine max
  Clone ID: 701099421H1
gtattatctctctcttgagagttgagagcatggagattggtcctctcttccccaacttagcgtggtggcagcaagtcaacgcctctacttgctgccaggacgctgttttctacttcctatgcgctgcttatgctcttgtctcttccaccgctttgattcaattggttagaattcaagttagagtacctgagtatggttggactactccgaagatttttcatctcatgaacttcattgtcaacggagtgcgtgcagtggtgtttggattgcaca

SEQ ID NO: 25414 - DNA, 270 bp, Glycine max
  Clone ID: 701099425H1
cggaaatctccaacctcctcgttgctcatcttcaccgaaccaaccacctcaacaattttccaaaccaaaacctcaatagagagaaacaaatttttcagaggccatcatggacagagaacaagaagagatgcaatttcttgggttctttgacatatacaaagaagcctctaagatcatactttcatggaggaaaatcttcacccaaatcacctcaacactaatcctgcctctctccttcatcttcctaatccacatggaaatctccaacct

SEQ ID NO: 25415 - DNA, 265 bp, Glycine max
  Clone ID: 701099426H1
cttctttctccaatttcctctctcacatcacgtcacatcacatataaacatcctctccttgaaacccttaattgtgctcaaaaatactatatagttaattaaggttgtgtgaaaatgcgaatgagttgtaacggatgtcgtgttctgcgcaaagggtgtagcgaagattgtagtataagaccgtgtttgcaatggatcaagaacccggagtcacaagctaatgcaactgtttttcttgccaagttctatggtcgtgctggcctca

SEQ ID NO: 25416 - DNA, 269 bp, Glycine max
  Clone ID: 701099427H1
ggatttgcaaaggagactaatcaatggaagctggaatatgttgcttgccacagattcagatgacaacacagaacatctagataacaaggcaacatgcatgaatttgcaaggtgtaggtcctgataatagttattccattaatgaagcaatatcagaaagtggcatcttctctggaacaggcacagaccaccttttagatgctgtggtttcaaaagctcaatcttctgcaaaacagaattatcatgaaatgtcatgcaggacaacattga

SEQ ID NO: 25417 - DNA, 267 bp, Glycine max
  Clone ID: 701099429H1
tacccacccaaagctgttgctaagatggccgctgttgctgcactgtgtgtgcaatatgaagctgatttcagaccaaacatgagcattgtagtcaaagctcttcaacctttgttgactgcacgacctggacctgccggtgaaacaccaaattaatctttgtatcactttctctctatatttgtgagtatgtgcacaagtgtgcatgcaaaatataagagactgcttcagaagctggtggtttgctttgcaccggttgtacggtgagga

SEQ ID NO: 25418 - DNA, 285 bp, Glycine max
  Clone ID: 701099432H1
tcggctcgatcgcaaatcagagaatccaaatgctttggaacaacttcaacaccgataagatgtggatgcaggcgctctctttgtcctcaaatccaaaggttcttggatgcattgtgggtaccattgacaacttcgatcgtggcaccactcttctaagtcttccttatgcattcaccttccttggatggacggctgggatcttaagcttagtgattggagctttggtcactttctattcatacaatttaatatctagggttcttgaacaccacgctcagatgggta

SEQ ID NO: 25419 - DNA, 286 bp, Glycine max
  Clone ID: 701099433H1
gcagaaatggcggcggctacggcaatttctcagcttggctgcttctccgccgtccaccgcagctcacacctccggcggcgctcgcttctactcccttgccctcgctccaagttatcagttgttatgagtctggagaggcatgacaagatactgctgggtctgataccaaaaatacactaagttatgcagctgatgtgtcaaagctacatgttgaagaaaaaaagcactcatattctacaaaagatggccatgatactgaaaaattaggttttggagaggcaacaca

SEQ ID NO: 25420 - DNA, 273 bp, Glycine max
  Clone ID: 701099436H1
gtttcttcttcttctctgttctctgttctcttcctcacaacataagacagacatagtttcgtggctgtggctctgtttgcgctgttgttgggctttgttgatgcgaggtttgtggtggagaagagcagtataactgttctgtcacctcataagctgagggcgaatgcgatggcgccatcggaaacttcggtcttcctcactacggaggattcatcgttggctctgtgctgcatctcaccaaaggctcccacgggtgtcaggtcttcgagggcg

SEQ ID NO: 25421 - DNA, 271 bp, Glycine max
  Clone ID: 701099437H1
gatgagcacaagagtttgtgcagcaaatatggagtctctgggtacccaacaattcagtggtttccaaaaggatctcttgaacccaaaaagtatgaagggccacgcactgctgattcacttgctgagtttgtaaatacggaaggaggaacaaatgtgaagattgctacagctccttccaatgtagtggtgcttacatctgaaaattttaatgaggttgtcttagatgaaaccaaagatgtcttggttgagttttatgcaccctggtgtggac

SEQ ID NO: 25422 - DNA, 272 bp, Glycine max
  Clone ID: 701099438H1
atcgagacgctataaccaaaggacattctttgcgaaacccttgatctgagaaaaagtaccaatggggacgccctctaagacgtaagttctcaacgaattttcctccgaagaggaacacgacgaggcctccgccgccgcgccaaccacgacatcgaagatgacgacgaggagctcgaagcggtggctcgctacgttagctccgatgacgacgataattcgccggatgaagccgctgaagacgacgacgaggataaacaggatgagagtaatgt

SEQ ID NO: 25423 - DNA, 268 bp, Glycine max
  Clone ID: 701099439H1
cccaaatccgtacccaacggaagttttggatttggattgttgtgctctaaaccataatctctgcaccttctactttcttgttccttcttcggcttggatgttttgtgaaacaaaaaagggttattgttgagaaacctaaacctatcctaaaccatggcgcataggttgctgagagaccacgaagcagacggttgggagcgctccgatttccccatcatctgcgaatcatgcctcggcgacagccctacgttcgaatgacaaaagcaga

SEQ ID NO: 25424 - DNA, 268 bp, Glycine max
  Clone ID: 701099440H1
agaccataaccttggaggtggagagttcagataccatagacaatgtgaaagctaagattcaggacaaggaaggtatcccaccagaccaacagaggcttatctttgccgggaaacagcttgaagatggaagaaccctgctgactataacatccagaaggaatctaccctgcacttggtgttgcggcttcgtggtggcatgcaaatctttgttaagactttgactggaaaaaccataactttggaggttgaaagttctgataccattgat

SEQ ID NO: 25425 - DNA, 266 bp, Glycine max
  Clone ID: 701099441H1
aggcgaattccaactgataaaaagaatattcagagaattccaaagacagagatgaatgtcattaaggaagagcaacaaccagaccaaatagctggccacaaagaacttggtcacaaaagtctccttcagagagatgcactctaacagtacatacttgagaccagtgtgtacccaagagagcatgagagcttgaaggagctacgagagttgacggagaaacacccttgagaactgatggctacaccaactgacgaagctcaacttct

SEQ ID NO: 25426 - DNA, 265 bp, Glycine max
  Clone ID: 701099443H1
ctaaatcatactttacattgtgcactctaattcccttgttttgtttacccacatttgtgagactatattatattggagcatatatcatgggtctgaagtttacacatggagtggtgatattaattgttataaggcttcaatgttttcagtgagcatggccaacaaggattggtcctttggtttcaactacactgattggtggtctagatttgggaatcatcctcaaaacaaaacacagcaacaacccaggcaaattctcgtgggt

SEQ ID NO: 25427 - DNA, 274 bp, Glycine max
  Clone ID: 701099445H1
tcagatctcacaacgcgcgtcatcacctaaagccgccggcaccggtagatggaggacgacgagaagaccacccttggtgggagaaatcgaggaggtggacgcgagttccgtggagtaggagggcacgagcgagcgggagaagcgcgtcgcggaccaaggtctcggaggcagagatccacctgtatcggcaggggaagggccccgtggcggtgttcaagtcggcactgggcggctgggagcaggatcagctcgagatcagggaggacatcctcga

SEQ ID NO: 25428 - DNA, 192 bp, Glycine max
  Clone ID: 701099447H1
actagcttgctaggtctcaaacagagagagccatactgcagtctctggaccatccacatctacccattttatatacacactttgagaccgacacattctcctgcttggtgatggagtgttgacctcgtggggactgcatgtacaaatgtaattacctactgcgaagtactcttctgagatttctgccaggat

SEQ ID NO: 25429 - DNA, 275 bp, Glycine max
  Clone ID: 701099448H1
cacggttctctctctgaggttaattgttataacgatagagtattgagcacgaggaggctatgacacagcagagtaccgatggatactggaacctgcagatcgtgatgctgttttggccaatgttgccatcaagagtggcaaaactacaatgtcattgtggaaattgccactatcctctccccggaagagcttttggcggttagacgcgcctatctcaaccgctacaagcactccttggaagaagatgttgcagctcatacctctggccatctacg

SEQ ID NO: 25430 - DNA, 283 bp, Glycine max
  Clone ID: 701099449H1
cttctgtttctctgtcttcattttagtttttacggctagaagaatgtccagctcatcggaatatttggcattttccggccaccacccggcgaactctccggcggaaaagtccactttctctcagacttgcagtctattgagcaatacatcaaggaaaagggtaccttcggagaccttaccctcgggatgacttgcactgccgaaacaaacggttcccctgagacatcgtgtcactctgcaacaaccatggagttgtttcccacgatcatcacgcaacggaacc

SEQ ID NO: 25431 - DNA, 268 bp, Glycine max
  Clone ID: 701099450H1
gcttctcactgatctccattcccattccatggcttccactgaatcatcccctttcaagaaaattcagattcaaagggatgacactacatttgacgcatatgtggttggaaaagaggatgctcctggaattgttgtgattcggagtggtggggtgtggattacgaaattaagaaccatgccgtgaagatttctcagcttggtagtgggtttaaagctcttattccagatttatacagaggaaaggttggtctggatgttgctgaagctc

SEQ ID NO: 25432 - DNA, 274 bp, Glycine max
  Clone ID: 701099451H1
gtccatcacaccaaaccaccaagtggcatcaatctttgcagcagcattctatggactctttaatctcttctctggtttctttatcccaagaccgaaaattcctaaatggtgggtgtggtattactggatttgtccagtggcatggacagtgtatggattaattgtctctcaatatagagatatagaggaccatctttttgtgcctgggagtactactcaaaatttcactgtcaaaggatatattgaagaccactacgggtttaaatccgacttc

SEQ ID NO: 25433 - DNA, 260 bp, Glycine max
  Clone ID: 701099452H1
ctcgagccgcggcacttgacaccttttatgagcaatttgatccagattttatcaacatacaggacaaaggctcgtgaagttctgctaagggcagatgacctgaatgacattgttcagcttgtgggcaacgctgcgttactgaaggagataagatcaccttagagactgcgaagcttttgagagaggattatcttgctcgtaatgcctttacagcatatgacaagttctgcccctactactagtctggttggatgatgcgc

SEQ ID NO: 25434 - DNA, 272 bp, Glycine max
  Clone ID: 701099453H1
cgccgagcaggccgagcgctacgaagagatggtggagttcatggagaaggtctccgccgccgccgacaacgaggaacttaccgtggaggagaggaacctcctctccgtcgcctacaagaacgtgatcggagcgcgcgcgcctcgtggcgcatcatctcctcgatcgagcagaaggaggagagccgcggcaacgaggatcacgtctccgtcatccgcgactaccgatccaagatcgagtccgagctctccaacatctgcgacggtatcctcaa

SEQ ID NO: 25435 - DNA, 272 bp, Glycine max
  Clone ID: 701099454H1
aaccagccccagactctcatgataagtgtgtatttttaatcaagcacggaactttcattgtcgtgaattcaaaattcacacttatcatgagaatgtgacgcaaggtatacatgaagattttgcatctgcccatgtagaaattaagattttgcattccagggaatgttcttctaaaacttataccaagcatgaaaatgacattcctaagctcacatcctcggaaatctttacatactttgaaacaaacatctcctaaagatttgtagatgttg

SEQ ID NO: 25436 - DNA, 264 bp, Glycine max
  Clone ID: 701099420H1
ctcaccttctttctttcttccttctcatcacaaagacacaagctttcttcctcaactatcctacccaacttcttattccactcatcacttcctttcaaattgaaaccaccaaaattgtttttttttagctcctttacccgtgtaatattttgaaaagtgttgtaccttgggttgataattgtggtagggcctaatgggtacgtgcctatcttcttgtgcctaggttgatgcacctctgatactcgaatccattgctgcatcagg

SEQ ID NO: 25437 - DNA, 260 bp, Glycine max
  Clone ID: 701099384H1
gatccctaatgttgtaggctctatgtacacctctcatgtgcctattatagctcctaagattagtgtggctgcttatttcaacaagaggcacactgagaggaaccagaagacttcttatagtattactgttcaaggggtggtggatcatagaggggtgttcactgatgtgtgcattggttggcctggttcaatgcctgatgatcaggtgttggaaaaaagtgccctttttcaaagggctaatggggggcttctgaaggggg

SEQ ID NO: 25438 - DNA, 264 bp, Glycine max
  Clone ID: 701099386H1
ctttgtatgagcttgtttggactgcacaaacaattgctccagacacgtgaaggtgctattgatggacaccttcgtgaagttggactcacatttcacctcctcaaggatgttcccgggattgtctcaaagaacattgataaggcactttttgaggctttcaacccattgaacatctctgattacaactccatcttttggattgcacaccctggtgggcctgcgattttagaccaagttgagcaaaagttgggtctcaaacctgag

SEQ ID NO: 25439 - DNA, 264 bp, Glycine max
  Clone ID: 701099387H1
cttcgatcttcgtcgctgaaaatgagagagtgcatttcaatccaactcggccaggccgggattcaggttggaaacgcctgctgggagctttactgcctcgaacacggcattcagcctgatgggcagatgccaagtgacaagaccgttggtggaggtgatgatgctttcaacaccttcttcagtgaaactggggcaggaaagcacgtgccccgtgcgatttttgtagatcttgagcccactgtgattgatgaggttaggactggg

SEQ ID NO: 25440 - DNA, 263 bp, Glycine max
  Clone ID: 701099388H1
cagtaatgaagaattagagagagtgagaggaggaagaagaagaagaagattccagaatccagagtgagaaacattaggcttatcagaggagacatgcccgagttgaaccgacaattctattactactctttgcttctttcttcatgcctcatcaaatcccaaaggatataattgaaggttttgggaactaaggctgcaatattgtatacattctactcaaggaatggtcaagatctggaaatttgctatgtggaaaggttaaa

SEQ ID NO: 25441 - DNA, 253 bp, Glycine max
  Clone ID: 701099389H1
ctcgagccgcgcgtagcccaattctcgtttgatgtcccagaatctcaacttaaatgcaggtcttagcggacaatggcagtgataatagtcaacatctggagctccctaacttaaacaagtctagtgggtcagcaaacgagtgtataccacctaatgttggatctggttcttttctgcttccttctggaaataatggcttcctggtagaagatactgatggtaggccaggctgttctcatgatactcgacgtgt

SEQ ID NO: 25442 - DNA, 242 bp, Glycine max
  Clone ID: 701099391H1
ccactatgcatctcacacatgagatcaaaattacataacacaaaacgcataaccctaatctccttaattcctgtgcgtggaaaggttcgagaatggtttcgctggaggaatctcgctcgaattcgagccgttttcccttggcgaggagttaccagtaccactcctcggtttcgtccaaaacgcagcgtcaaattggaaggtccatgcgcactatacgctccaatttcttccaagacgacaac

SEQ ID NO: 25443 - DNA, 262 bp, Glycine max
  Clone ID: 701099392H1
ctccaactaatcatacagatcgataatcataatcatatctatagctaattaacttaattattttcatccctctactcttcttctctcctctaaactctcttttccattcttgcttcctttgtgggttgtttgagttttctttccttcaatttaattgaaagatggcttgcttggtatctcgctcgggaagggaattgcagaggtacaacaacatgggtggccggcaagttgttgggtgcataccttatagatataaacaaga

SEQ ID NO: 25444 - DNA, 265 bp, Glycine max
  Clone ID: 701099393H1
cctagctcgggttcagagactattgagtgtggagtttgccagcacccatttcttgtgagtgctcattgagttccgataaacattaatatggatgagaaggtgtcttcgtgtttcacaagtttaaaattcatttgttttactgagctatctcttgcacattaattatcaatgattgggattgccttccttttactattatttttgggcttgtttcatgtcctagttttaccttgcatgcatcttttttttatttttttattttgtg

SEQ ID NO: 25445 - DNA, 270 bp, Glycine max
  Clone ID: 701099394H1
gccacaagatcatcaacgtgctgaacccggtgtttaagggtcagcaattggtgccactcaacgctgaccaatccgcggaactgaagaaggagaacgccactggggtgtacgagatcgatgtgaacatgtaccttagggtcaggttcaagttgggtgtcttcaagaccaagacgcttaagcccaaagtatcatgcgacttacgtgttcctttgaaaggaagcgccggtgctggtgtctttcagaccaccaagtgcgactgggatcgctgat

SEQ ID NO: 25446 - DNA, 267 bp, Glycine max
  Clone ID: 701099395H1
tttcattcctcctctttctctatactatttacgtttcaagtaaaaaacaaaaaaaagttgaaggaaagccaaaactagattagattagaaccaaaccaacaacaaatcatctatctatctcgcgcagatccatttcccttcactttcccgggagaaaaagaaacctccgtttcgcgagaaaccccgtccgtacatggtctgttcacgcggatcgggttgattgaccaccaccaccaccaccaccaccaccatcgcgcgtgagatgca

SEQ ID NO: 25447 - DNA, 272 bp, Glycine max
  Clone ID: 701099403H1
cggcattaaaaatgcagatcttcgtgaaaactctgacagggaagactataaccctcgaggtcgagagcagcgacaccatcgacaatgtcaaggccaagattcaagacaaggaaggtactacacataaattccaactccattcaacgaatcgcgttttcaattttccataacctaaaaaatctctcgtctgaatttgtcaggcattcctccggatcagcagcgtttgatttccgccggaaagcagcttgaagatggaaggaccctggccgatt

SEQ ID NO: 25448 - DNA, 271 bp, Glycine max
  Clone ID: 701099405H1
acgattacgaagcaattacatgagcatgggggaagctcatagaaggatcacggagtatctgaatcgcttttccgacgcgatttcttcgcaagacggagctacgttcaagtctctcttcgctctctcttccaactccccattccttctctctctgggcgacgctctcaacctcttccaagaccccaacagactcatcaagcaatccgacaactattcccagttcgcagacatcctcgtccctctcttccgatccctcctaaactaccgccag

SEQ ID NO: 25449 - DNA, 147 bp, Glycine max
  Clone ID: 701099406H1
cggcacacttagatttttcactccaattccgattttcccaccaccgttctccgacattttccgggaaaattctgtgcccttctcctcactcgctccaacagaccccctctttcgattctctttcggttctttcttttctttcttttc

SEQ ID NO: 25450 - DNA, 270 bp, Glycine max
  Clone ID: 701099408H1
ctcgagcgcttgcatatcctatctacctgtggagcatgagtcccgggaagactggatctcactttaatccagacagtgacttgtttgttcccagtgagagaaaagatgttattacttcaacaatttgttggacagctatggctgctttgcttgttggtctgggatttgtgatgggtccagttcaattgcttaagctttatggcattccctatgcgatttttgttatgtggttggatttggtgacttatttgcatcaccatggccatgaag

SEQ ID NO: 25451 - DNA, 271 bp, Glycine max
  Clone ID: 701099409H1
cccaattgcaacatactaagtgggttggctggtttagatctgagcaacagcttttaattttctacttgcttgaattttattggaagccatggattgttcatcatggattaacacttccttggatctcaacattaatcccgcagagttcatgaagaagttcccaaggaggtagaaagcgagcttttctctttgggaatgaccaagtttaacgtggaagaagagtctactagtgacttggaggaggaactgaagcgggtgactgcagaaaaca

SEQ ID NO: 25452 - DNA, 272 bp, Glycine max
  unsure at all n locations
  Clone ID: 701099410H1
ctgaattcaactcacttcaatttctttaccttatatatatctatccaattaaccactcttatatttagaatccaaaaatctctcgtcgtccaagaaagaagcaccacaaattaattctcgtttcccattcccatcccctgccaactattttgcataggattttccttctttacaacctcgtacactcattcctcctctgtctggtccccaagaaggtgcgtcncttcctcnccccttcttggttccaaacanaaccatcactgcaccttctt

SEQ ID NO: 25453 - DNA, 262 bp, Glycine max
  Clone ID: 701099411H1
caaatatgcactcatggcttaccactatgaccctcaagtctctctacctgagctctcatccatttcactctacactccaaaacttgttgaagttgtcaaagagaggccaaaatggaatgccacagaattcttcaaacaatccaccccaacacgccttaccttcaccaactaccttgcagctggggagcagtgttcttcccaaagcattggagagagttctatgtgtacatgaacatgaggttcactgaggatgccaagtcca

SEQ ID NO: 25454 - DNA, 267 bp, Glycine max
  Clone ID: 701099412H1
gcataactgactcgagtataagttacatgttttgcgtgtgtgtctggcattctgtcttggtttttaagggctactaccatctttttcaaaagtatcatgttcttatccaaaaatgggtatgtactttggggatttgaggattactgttgtagtaattttttatggttattggtaatgactattatttacttgttaattctgtgtatcatttgaatatcaattatttcttctggatcccttttgcaaaccatttttccttccatttaa

SEQ ID NO: 25455 - DNA, 271 bp, Glycine max
  Clone ID: 701099413H1
gcagctttggagaactgggaagaaagattatgagactattctcggctttctgcgtcggtgatttcttcccttcgttgggttgggttgactatctgactggccttattccggaaatgaaggccacgtttcttgcagttgatgctttccttgacgaggtaattgcagaacgcgagagcagtaacaggaagaatgatcactctttcatgggaattctccttcaacttcaagagtgtgggaggcttgactttcagctcagccgagataacctcaa

SEQ ID NO: 25456 - DNA, 265 bp, Glycine max
  Clone ID: 701099414H1
gaaacatttcactaatagagagacataagcataatattgagaaataatggagggttgtacttattgtgtgaagttgctatgccttgttgggtttgtggtgcttgtgagtactattgcaggggtggagagtgctggtgaatgtgggaaatctaccaccccagataatgaggcttataagcttgcaccatgtgcctcagcagcacaagatgagaatgctagtgtttctcagagttgctgtgctcaggtgaagaaaattgggcagaac

SEQ ID NO: 25457 - DNA, 272 bp, Glycine max
  Clone ID: 701099415H1
tgaaattataaaaaacaacaacaacataggagatacaaagaacaaggattgattcgtatcagagagagaggagatgggaactgttacacgcagctcctctgaagtgtattcaagtgacagtgaaaaggggtttgcgtgaaccactctacttctacttccccagagctagatgcacgggcaaagtttgttcttgtatctcgaggatcatggttgcactgtgggtaccatttgactacatctattgtggctccggtgcttcttactcttccttt

SEQ ID NO: 25458 - DNA, 267 bp, Glycine max
  Clone ID: 701099418H1
aataactccgtcaggggatgtatttttgctagaggccaaccctcgagcttctcgtacagttccattcgtatccaaagcaattggccatcccttggctaaatatgcttcccttgtcatgtctggaaagaccctctgtgatttacatttacaaaagaagttatccctaaatatgtgtctgtaaaggaagcagttcttccgttttcaaagtttccaggctgcgatgtgtttttaagtcctgagatgcgaagactgtgtgaggtcatgggt

SEQ ID NO: 25459 - DNA, 257 bp, Glycine max
  Clone ID: 701099383H1
ccagggttacctagacccagaatatttgttgactcataagctgactgacaaatgtgatgtctatagcctgggaattgtgtatctggagcttttgacaggcatgcaaccaatatcacatgggaaaaacattgtccgcgaggttaatacggctcgtcaatctggcacaatatattccatcatagacagcagaatggggttatatccatccgattgcttggacaagtttttaactctggccctcagatgttgccaagaca

SEQ ID NO: 25460 - DNA, 270 bp, Glycine max
  Clone ID: 701099356H1
gttcctccgctcaacaactataataacatctttctctctccgaacagatcacactatggccacctcaagcgccaaatcagtccatgatttcaccgttaaagatgccaagggaaatgatattaatcttggtgactacaaaggaaaggtccttatcattgtcaatgttgcctcacaatgtggcttgactaattcaaattacactgagctcagtcagttgtatgagaaatacaaacagaaaggtctggaaattctggcatttccatgcaatca

SEQ ID NO: 25461 - DNA, 269 bp, Glycine max
  Clone ID: 701099357H1
tgcgttggtactgaattccttaatcgagtccagtattcataatctttgagttgatatgggcaactgcgagcagtgaacgtcatcaaaccactcaacaaagtgatctcggtgcagttttgcgtgatggaaaagaagtacttcttcaagcattcaactgggagtccaacaaatacaactggtggaataatttagaaggcaaagtttctgacatagctaaagcaggatttacttcagtctggttgccaccaccaacccactccttctcacct

SEQ ID NO: 25462 - DNA, 267 bp, Glycine max
  Clone ID: 701099358H1
caccggtttatgtcctcctatgaacagagggtgcaaccctttgataaaaggtatcagtacctcttgtttgctgctgaaccatatgaaatcgttgctttcaaggtgcccagcacggagattgacaagtccactccaaatttcttctcgcactgggatcctgactccaagatgttcacgctacaattgtattttaaatccaagccgccagaggcgaacaaaccgcagcctgcctctactgccaatggcacagcaccatctggtgtacca

SEQ ID NO: 25463 - DNA, 269 bp, Glycine max
  Clone ID: 701099360H1
gttccattctgaaaagtaaaaaaatacaaaacaaaaattgaaaattccaagttggggttctcacgatttcgattcaccctttctcccacacactccgattcttcttgtaaacagcggtgccagaagttgatataggatgggggcaatgatgtcgagattctggttcatgttattccctgcaaaagagtataagattgttgttgttggattggataacgctggaaaaaccactaccctttataaattgcatctgggtgaggttgtaacta

SEQ ID NO: 25464 - DNA, 274 bp, Glycine max
  Clone ID: 701099361H1
gcaaactgcattgcatatggctgtaaaagggcagagttgtgatgtggtgaaattgcttcttgaggcagatgctgctattgttatgcttccagacaaatttggtaacacggcgttacatgtggcaaccaggaaaaagcgagtagagatagtgaatgagttattacatctgccagacaccaatgtgaatgcattaactagagaccacaaaacagctcttgacattgctgaagatcttcccctctccgaagaggcatcagatataaaggactgtctt

SEQ ID NO: 25465 - DNA, 271 bp, Glycine max
  Clone ID: 701099362H1
caaagctgaagtgtctgcttcttccgattccggcacgcccccatcaccatggtgaacgttccgaaaacaaagaagacatactgcaagagtaaggagtgcaggaagcacaccctgcacaaggttacccaatacaagaagggtaaagatagcattgctgcccaaggaaaacgccgttacgatcgcaaacaatctggttatggcggacaaactaagcccgtcttccacaagaaggctaagaccaccaagaagattgttctgaggttgcaatgcc

SEQ ID NO: 25466 - DNA, 251 bp, Glycine max
  Clone ID: 701099363H1
accagcatctcattcccgtccccggcgactgagtagcggtctcttcccaactcggaactcagtccattccgcatttcaattttctcttcacttggcaaagaccaaaccaaaccctggctgaagaagagaattgactgagaagaagaacacagaaatgggctccgaactgattttcagagggcacgagacccagcccgtggacgacgcgtactcaccaaagccccacaaaccctggctcaccgtgactcgcc

SEQ ID NO: 25467 - DNA, 279 bp, Glycine max
  Clone ID: 701099364H1
cagcaaactaaatgtgaagtttgccagaaacaagatgggaaggaaccattttcagcagcaacactgtgctgatgggagcatgtggatggagagtcagggtcagcaacagagctatgccttccaagaagagtcttggagccctgataacaactatggccacaaccacaagcaattcccaggcatgcacatgaacatgaacaacaacaacaacaacaaaaggcttggtgcttttgctgctgtggactctgacttctcaatgcaaaaacatcatcatgggca

SEQ ID NO: 25468 - DNA, 263 bp, Glycine max
  Clone ID: 701099365H1
gcgttggtactgaactccttaatcgagtccactattcataatctttgagttgatatgggcaactggagcagtgaacgtcatcaaaccactcaacaaagtgatctcggtgcagttttgcgtgatggaaaagaagtacttcttcaagcattcaactgggagtccaacaaatacaactggtggaataatttagaaggcaaagtttctgacatagctaaagcaggatttacttcagtctggttgccaccaccaacccactccttctc

SEQ ID NO: 25469 - DNA, 258 bp, Glycine max
  Clone ID: 701099366H1
atctaaaggtgctgctctcgaaatctgataagaccaacgttcagcttcagtttgctaacgtagaggactctgcaggccacgtagggcgtttgggagtgagtttaattaccactttgtctcttggattcgcttacttacttctccttttgtattaattaggtctactcgtgcgtcacgctttaccttggttgtaataattttatgattgttgaatgtgcatcagtgcatgttcccccgcgcatgatttctttttgtttt

SEQ ID NO: 25470 - DNA, 260 bp, Glycine max
  Clone ID: 701099367H1
ctccatggtatctttgaggctgcaagttttggaggatctaatattgatccaacggcttgggaggataagaagtgccctggtgaatctcgtttccctgctcaggttcaagtgattactaggaaagtttgtgagccactagaggaagattccttcagaccaattcttcaccactacgacggccctaagttccgtcttgagctgagtgtgcctgaggcactgtctcttctggatatttttgcaaaccagaacagtttcgatga

SEQ ID NO: 25471 - DNA, 263 bp, Glycine max
  Clone ID: 701099369H1
tgaacatgtgcagaaagaatctttgaagtttgaacatgtgtaggatcaatgctttaaaacttgggggtatcgaattatgtgtcctgtcgcaatcttaggtagatatgctggaacagagaaaaattgcctctccgcatcaaattggtgccaggaatgttttctgctggttgaccttgagcaattgttacaaccagaaaatgctaattcacaagaaattcagttttttgcggctgtgcccgttatttggtgacaacttctgacca

SEQ ID NO: 25472 - DNA, 264 bp, Glycine max
  Clone ID: 701099371H1
ataaaaaggtaaaaaggatggaaaagtttatatcaactaacgcaactttgtatcaagagatggaactgctggctgatcttgagcaaactcttgaaagaatgaaggcttacactgaatcagatgaaccaaatttaattgactatcaaaagaaggttgcatggaaggggctggaggtgaagaacttaaaggctaattctctgtggaacagaacatatgattacacggtgcttgttttagcaagatctttatttacaatattcagta

SEQ ID NO: 25473 - DNA, 266 bp, Glycine max
  Clone ID: 701099372H1
acaacatcctccgacaccatgttgcacatggaaaaccccctcctgcagtcaacaaactcaattaccttcacattctttgggctgttgttatttctctttgttctttcatccatattcagaaaccgcggtgctgcaacaagaaaagcaccaccagatgcaagatgcgcgtggcctttaattggtcacatccacctcttaggtggctcaaaaccaccccatgtcacgttgggccacatggcggacaaatatggtcccgtcttcacctt

SEQ ID NO: 25474 - DNA, 264 bp, Glycine max
  Clone ID: 701099373H1
aacaaagatggctaggtctagtgcttatcctttgttcttgatttcttccattctgtttatttcacacatttatgccttcaaagtagaagccaagcccccagtagtgaagggactatcatattctttctattccaaaacatgccccaagcttgagtccattgtgaggaaacatctcaagaaggtgttcaaggatgacaatggccaagctcctgccttactccgcattttcttccatgattgttttgttcagggatgtgatggatc

SEQ ID NO: 25475 - DNA, 257 bp, Glycine max
  unsure at all n locations
  Clone ID: 701099375H1
ctcgagccgatcacacttttgtgttgtgttgggaaaccctaaaccccgttttcggtgagaccgagatcgatcgaacatggatgacgagtacgatgtgatcgtgttgggcacgggtctcaaggcgtgcattctcagcggtcttctctccgtcgatcgnctcaaggttctgcatatggctcggaacgactattacggaggagaatccacttcgctcaatcttattcagctttggaagagattcaggggagatgacaagc

SEQ ID NO: 25476 - DNA, 266 bp, Glycine max
  Clone ID: 701099377H1
ctaacggctacttggtagttggagtggtagcttttgctctactttgctcattcagagtttctttgacagattcagttccattattttcgcctgttcatgacgctgcttctttgactcgcaactctttccctgctggcttcatctttggggctggatcctcagcctaccagttcgaaggagcagcaaaggaaggtggaagaggaccaagcatatgggataccttcacacataaccatccagaaaagataagagatggagccaatgga

SEQ ID NO: 25477 - DNA, 257 bp, Glycine max
  Clone ID: 701099378H1
gtgatcttacagatggaattcgtgagattttttgattgctggaatgattttcaagaaaaggccacaacccaagtcttgattgttttggacaagtatgagaaccgcgatacttatgtggtagctttccgaggaacggaaccctttgatgcagatgcatggtgcactgaccttgacatctcatggtacgggattcccggcattggaaaaatgcatggtggcttcatgaaagccttagggctacagaaaaatgtggggtg

SEQ ID NO: 25478 - DNA, 270 bp, Glycine max
  Clone ID: 701099379H1
cttcaaaggtgtgcatcccaagtttccaaatggaggactcatgtctcaacatttggactctctacccattggatccatgttggacgtgaagggcccattaggtcacatagaatacaccggaagaggcaacttcatggttcatggaaaaccaagattcgccaagaggttggccatgttggctggtggaactgggatcacgcccatttaccaagtggcgcaacgattttgaaggacccagaggaccacaccgaaatgcatgtagtgtatgcg

SEQ ID NO: 25479 - DNA, 220 bp, Glycine max
  Clone ID: 701099381H1
cgttgcaccacttcttctaattcttccttatgcattcaccttccttggatggacggctgggatcttaagcttagtgattggagctttggtcactttctattcatacaatttaatatctagggttcttgaacaccacgctcagatgggtatgcgtcactacgctttagagacatggctcgcgatattttaggtccagggtggggtcgttattttgtcggcc

SEQ ID NO: 25480 - DNA, 256 bp, Glycine max
  Clone ID: 701099382H1
aacaactactatgggtatggcagatgctaagcaaagatatgctgttgtcacaggtgcaaacaaagggataggattggagacagtgaaaggtttagcctctaatggaatcaaggtggtgctcacggccagggatgtgaagaggggttaccaagctgttgaggacttgaagagagaatttggtttctctgaccttgttgtgtttcaccagcttgatgtcactgacccttctagtattgcttctttagttgagtttgtg

SEQ ID NO: 25481 - DNA, 266 bp, Glycine max
  Clone ID: 701099355H1
cgatggcaagctttcaggggtgaaagcacagaggccaaagatctaatctttactctgaagcgttcgtcccttatccagtttaagaccaaattagatgtgtttttggccaataacacaaaagaagatgtttgtgactttaaggtcaaaggtagttggttggaacgatcttgcgttgtttatgctggtgaatctaacaacatcgtagcccagatgcataaaaagcacacggttcagagtattttgattgggaaagaccaattcatggt

SEQ ID NO: 25482 - DNA, 270 bp, Glycine max
  Clone ID: 701099321H1
gcaaacttcaacttgtaatcaagggagagagtaaatttcaagcacaaaaaatggcggagaagaaagtggtgatcctaggaggtggtgttgccggtgccaaccttgcaaaaactatacaacgtcaagccaacgtcacccttattgatccgaaggaatattttgagattccatgggcaagtttgaggggattggttgagccaacttttgctgaaaggatagtgatcaaccatagagagtacttcaaaaagggtaaccttgttgtatccagtg

SEQ ID NO: 25483 - DNA, 270 bp, Glycine max
  Clone ID: 701099323H1
cggctcgagctttctctttccctctctcaacttccctacaattcatatattgccaagtagtgcagatcccgtgcagaagccaaataaaatccctttgtttgctcacataagatttgggtttcttcaaaattatctttttttttctctcctaaaaaaaaaagagaaaactttgtttgattctttgaaggaggtttgaagaaagcaaaaggtgtagttttgttttaagtttctttgaaatggttttcatgtctgagatattgttccccgaag

SEQ ID NO: 25484 - DNA, 261 bp, Glycine max
  Clone ID: 701099325H1
aaaagccgaacgtcgcacaaaaaccccaaacctagcaatcattgagttttgtttgctttgaaacatcgtgtgcacagtaccccagtcgatcgaacaaggatctccacaaagacaaaccccagttcctcaactgtgttttacctctctctcacctactttcagaccatacccagggtttttgctttttctttttaaattagtttcagtgacattaacgaggctgagaagatgcagcagacaccgccaatgattcctatgatg

SEQ ID NO: 25485 - DNA, 269 bp, Glycine max
  Clone ID: 701099328H1
gtctgatttgaggttggagcgtagttagcttctcttttctgccgaaagctgcagaattgtgttgttttctctcctttgggggtcaaacaagcggttctcttcatgatgccaagtgttaaccctgacaaagattccgagccatttgttgagaccgatccaaccggtcgctatggtagatacagtgagttgctcggatgtggtgctgtgaagaaagtgtaccgtgcatttgatcaagaagaaggaatagaggtggcatggcaccaggttaa

SEQ ID NO: 25486 - DNA, 273 bp, Glycine max
  Clone ID: 701099329H1
ctgctccttatgttgttaagcctcaagggtctcaggttcctttggttcccattcctaggttgacgcctcagcaacctgcttcagcccccaagggtaaaaagagtgagaacaagaagagtgaggggaaaactacgaaggttgctagcattagtttgctgggtttgttcttctttatcatgcttttcggtgggcttcttcctcttgttgattttaggtttgggggtttagtggagaatgttcctggtactggtaggtctaattacgttagtgata

SEQ ID NO: 25487 - DNA, 279 bp, Glycine max
  Clone ID: 701099330H1
catcttctcacccagtttcactttctcattctcccctctcccattcctacagaaacagagagacagcgaaacaaatgcctgcggtaggaggtattaccaacggaggcggcaacgagtaccctggaagcctcactccttttgtgacggtaacatgtatagttgcagccatgggtgggttaatcttcggttacgatatcggaatttcaggtggggtgacatccatggatccgtttctgctcaagtttttcccgtcggtgttccgcaagaagaattccgaca

SEQ ID NO: 25488 - DNA, 283 bp, Glycine max
  Clone ID: 701099332H1
cctgtttctccggcctcgcttcttctctcagattcagataccaattcggtttcttctgaaccaaacttggtttgagaaattcggccgttaattttccatggccaacaatccatcacagcttctcccatcagagttgattgaccggtgtataggttcaaaaatttgggtgataatgaagggtgacaaggagcttgttggtactcttagaggctttgatgtttatgtcaacatggtccttgaagatgtcactgaatatgaaatcactgctgaagggagacggata

SEQ ID NO: 25489 - DNA, 255 bp, Glycine max
  Clone ID: 701099334H1
tagggaaggaagaaggaacaactatactactattatccttattattgttattattgtaattaatctttttattatagttattgttgttgttattattcctcaaatatggattcgttgtgcctctccaacgactcagttgtttctggattcaaagacaaggagtcaatggttgacccctttttggtcgaggctctccagaaccctcgtcaccgcctcaccattttgaggatggagctggacatccagaagtttttg

SEQ ID NO: 25490 - DNA, 264 bp, Glycine max
  Clone ID: 701099335H1
atcacctctacttttcctcttccaacacaaacactttccgtttcgttttttttttcttcagattcaaaccaaaccagagcaaaccaaaaaaggaaaagaaaaatcccaaaatccacaacgttacttcctttccttattagcgagaggaaaaaaaaattaatttaaaaggcttcttgtaaatttccctggaaacttcattttattttcctcttttctcttcttcgcgctcgttcgttcgttcctctgattattattcatcgatca

SEQ ID NO: 25491 - DNA, 260 bp, Glycine max
  Clone ID: 701099336H1
tttgttcacatcctcaacagccaaaaatttagctcaactccaaaatatggagatagaattttgtgaatcaattaaagagatagtgtctaaggagggggatgaatcacatgaggatgagataacatttccgcagctcaattgtttggtacttaaagacttaccagatctcagaagcttctacgaagggagtttaagtttcccatctttggagaaattgtcagtaatcaaatgccactggatggaaactttatgtccgggta

SEQ ID NO: 25492 - DNA, 264 bp, Glycine max
  Clone ID: 701099337H1
atccaatcgtggcggaaccaaagtagttagttagctatattacattacaattacatgtggggctgtcggcagcgccttgttttgtactgtacttgtccaatatgtgatgactaagccaaggtagatctattatagtattatctatgtcatatgatatatgctagacgtacgtacaaattagttttgtctttgtttttgtgctgagtgtgtgacaggaagaaaaaaaaaagtcaaaaggtgttctactgcatttgaatccagtgc

SEQ ID NO: 25493 - DNA, 265 bp, Glycine max
  Clone ID: 701099338H1
gctaccgtaagattaaacaccaaaaagatccagattctcctggtcttactatgaactatgaagggagcttgaagtgatgttcggataaaaggtttaggtagtggccaaccttaacaaatcaaaagaagttagcaattgataaaaaaaactcacagatgcatcatcaacttgctctacctaccaccttattttcggccttgtgaggaacaaagggtctaaataaatagccttgtataacgactctaattaactcaccctttttgtc

SEQ ID NO: 25494 - DNA, 117 bp, Glycine max
  Clone ID: 701099339H1
tgattgttgatttcattttcctctggcggaagccatttttcgatctgttggtgtgctttctggaaaggtcgtggatggcaaaaaacaacaagtacgcctctattaacttccacacaa

SEQ ID NO: 25495 - DNA, 268 bp, Glycine max
  Clone ID: 701099342H1
gaatataccttctttcaccctcccttcaacactcttttgcctctttattcttctaagtctcaaagcaaagctcgaagacctgagaagaacaaagggttgattaaattctgtgtggttgttgttggaggttgaaacacaagttgccaccccaagtgtgtgttaatcttaaatttcacaagcaagttgcttttctggagtattatattgtatgaccaaatatttttgtgttttaggactagatattttgcttctggtggcatttttctct

SEQ ID NO: 25496 - DNA, 271 bp, Glycine max
  Clone ID: 701099344H1
gcataagccatgcttctgtggctacctcaaaaaccctagcttgaagcagtatgttaactctcctaatgccaaaaaaaccgttagttcttgtggtattgcctatccaacttgttaagcacctcttatatatatatataaaatgtgtgaacaatatatatatattgattaaaaaatatagtttaatttatatacacactttgatcctataaaaacatcttgacacaagcattcaatagaatttcaccactttatcatgacattttactataat

SEQ ID NO: 25497 - DNA, 274 bp, Glycine max
  Clone ID: 701099346H1
caattcacaaccgaaacagtttccatctctctcacaaaatgacaacaatatcaaattgctcccttctcttcctcttcctcttcctctccaccctccacatagcttccaccctctcaacccccaccaacttcatcaagtcctcctgcagcaccacccagtacccagccctctgcatccagtccctctccgtctacgcctccaccatccagcaagacccccacgagctcgtccagacagccctctccctctccctcaaccacaccgaggccacaaa

SEQ ID NO: 25498 - DNA, 265 bp, Glycine max
  Clone ID: 701099347H1
cggctcgagctagaacgaaaaaaaaaaagaagagcaattttccctcaccaaagatgaagaagccaacaatggccgatcaacttaccgatgaacagatctccgagttcaaggaagccttcagcttgttcgacaaggacggcgatggttgcatcacaaccaaggagcttggaactgttatgcgttcattggggcaaaacccaactgaggcagagctccaggacatgatcaatgaagtggatgctgatgggaatggtaccattgactt

SEQ ID NO: 25499 - DNA, 280 bp, Glycine max
  Clone ID: 701099348H1
cctcgagccgaatcggctcgggatgaattgggtgatgctactagctctgcagcaatagggcatgatgcagactcaaacagtggaacagaggatggcattcattcttcaactgcctttgaattctacttacaaggaatagagagggcgaagataatagtgaaaaaaccattaccacaagtcacaacattgcctggaaagctgcctgtggtagttgtcttgtggtcggataagatgcttaacatgtatgatacatacctgcttgactcattgcctgaggttt

SEQ ID NO: 25500 - DNA, 262 bp, Glycine max
  Clone ID: 701099349H1
atggtggtggtcccaatttccatgctactgaggataagccagtcatattcccccagtcctttgttcaacccaacactacaacacagtctgcaagtttggttgcaccttcatttgatctaactggtcttggagttccggaggatggacagaaaatgattagtgaccttatgacaatctatgatacgaatgttgtaggaaacaagaacttaagttcctccaactgtgtagctgtagaaaatcataacctttctcaggccagctt

SEQ ID NO: 25501 - DNA, 246 bp, Glycine max
  Clone ID: 701099350H1
gccactaagaatgacctattaggtatacttttggagtccaatcacaaggaaattcaagaacacggaaacagaaacagtaagaatgttggaatgagtcttgaagatgtaatcgaggaatgcaagctattctactttgcagggcaggaaaccacgtcagttttgcttgtttggacaatggtgttattgagtaggtaccctgattggcaagcacgtgcaagggaggaagcctttcaagtcttgggatac

SEQ ID NO: 25502 - DNA, 266 bp, Glycine max
  Clone ID: 701099352H1
ctctttttgttgttgttgatcacctcctcaacccactattccaccttcttctacgtttttctcttcccaccccttagtctcagaatcagatcacaccaccgcaaaaccctaaattcaattttctccatttccgatcttgcccccggactgcaaatggggagcaggagggacgaggcgcccgccataaacaacaccaacgtcttcgcggcgctcggcagcttgaagaagaagaagaagcccgagaaggaccaggaccagggcccgtc

SEQ ID NO: 25503 - DNA, 269 bp, Glycine max
  Clone ID: 701099353H1
cgacacagtttccatctctctcacaaaatgacaacaatatcaaatcgctcccttctcttcctcttcctcttcctctccaccctccacatagcttccaccctctcaacccccaccaacttcatcaagtcctcctgcagcaccacccagtacccagccctctgcatccagtccctctccgtctacgcctccaccatccagcaagacccccacgagctcgtccagacagccctctccctctccctcaaccacaccgaggccaccaaaacctt

SEQ ID NO: 25504 - DNA, 267 bp, Glycine max
  Clone ID: 701099354H1
gtaatttgcaaacacaccaaaaccatctctctctctctctctctctccaattcagacccctagttctgttggatcttgcatatagtaaccctttattgattcgcaaagatgaaggtcacagtggtttctcggagtggaagagaagtggttaaaggtggcattgagctcagtgattctccaagaagtacccatcaaggcagcgcttgacacttccagtccaacctggatcaaaggaaaggcctgttgtccttaattacaaaaagagtc

SEQ ID NO: 25505 - DNA, 267 bp, Glycine max
  Clone ID: 701099320H1
acagaatctactctctttttttctaccttagattccttctccaacaatggctctcgccgtttccactacttcttcctcttcagcagctgctgcagcttctagctccttcttctctcgtctcggatcttcctccgacgcaaaagctcctcaaatcggttcgtttcggtttccggagaggtcgcttgtttcgtctgttgttgtcaatgtaactcaacgacgctccttggtgaggccactcaacgccgaaccgcaacggaacgattctat

SEQ ID NO: 25506 - DNA, 255 bp, Glycine max
  Clone ID: 701099284H1
gttcctctcgcccagaatccgagatcaaccccgacgaaggcaaggcctttttctcggcttcttcagatttctgaaatggcgcctgtttcagctttagccaagtacaagctcgtcttcctgggtgaccaatccgtgggcaaaaccagcatcatcactcgcttcatgtatgataaattcgataacacctatcaggctacaattggtattgattttctatcaaaaactatgtatcttgaagatcgaactgttcgactg

SEQ ID NO: 25507 - DNA, 232 bp, Glycine max
  Clone ID: 701099285H1
gtcaaatggcggcgagtagaagcatttttactctgatgaaatacttgagagtgcgcgtcgaagctcttccccgaaacactccctttaccctcgctccaaacttttctgattcgccgcttctgtgaagaggttaggggttattttctcgacaagtctgacgtcacagatcgcgtcatttcctgggtaaaaaacttccagaaagttgatccttcaaaggttaaccctaatgatc

SEQ ID NO: 25508 - DNA, 252 bp, Glycine max
  Clone ID: 701099286H1
gaaagaccaaggcatatgcaggtggaatcatgccttaagatcagctcaacaccatctcaaaaaccatgttggctcattctctcaggctaacaagctttcttcttctgctatgatatccacaacactaaaacatgagaaggcaaatcaatcagaagagtctttgagaactgtcatgtacttaagctgctggggtcccaactagatatcataagcccaacaacaaaatattcttttctcttttcaatcctagga

SEQ ID NO: 25509 - DNA, 159 bp, Glycine max
  Clone ID: 701099287H1
aagaaagatgtaatctttcctctatgatatcagggactctagttttactgggaaaattgatgctcatttgtaccatatagcataattgagaagttgtgcgaggatttgatgaactcatggttataaaatgatggttttcttaaataaatagtgttgtgt

SEQ ID NO: 25510 - DNA, 127 bp, Glycine max
  Clone ID: 701099288H1
gcggaggaaaagaaactaacaaggattcccttagtaacggcgagcgaaccgggaaaagcccaccatgaaaatcggtcgccctcggcgtccgaattgtagtctggagaagcgtcctcagtgggggacc

SEQ ID NO: 25511 - DNA, 250 bp, Glycine max
  Clone ID: 701099289H1
agaaaagagaattagggtcacgagggtttcatcctgcggcatcagacatgggaggaggcaatgggcaaaaggcaaagatggctcgcgagaagaacatcgagaagcagaaggccgcctcaaagggaagccagctggattcaaacaagaaagcaatgtcgatccagtgcaaggtgtgcatgcaaacatttatgtgcaacacatcgggagtgcagtgtagggagcatgctgaagccaaacaccctaaatctga

SEQ ID NO: 25512 - DNA, 173 bp, Glycine max
  Clone ID: 701099291H1
aaaaatgtttggtttgcagtattttttacattacgttcttcctatcagcccaaaagaacgtaatgtaaaaattacaattttataaatatttaggtaaagaaaccacttgcaagtaggtttgttgtgctaatgataaccaagtaatgattgacgagcgtacagctgttgtcctt

SEQ ID NO: 25513 - DNA, 250 bp, Glycine max
  Clone ID: 701099295H1
aattcctcttctttttttctttttctctgagtctcagccatatccatcatctttctctctccgccgcatgcgggggtgacgtttgatacccttcttcttatacagatccgccgccccttcttcctcccaacgccgctttctgctgtggacccggtttatgacgattccttggcaaacaacaaacgcatattgaagaatttgtggtttcacgattttacccctcgaaatcagaagtatcagtagcgtctac

SEQ ID NO: 25514 - DNA, 271 bp, Glycine max
  Clone ID: 701099301H1
gcttaacgttgttggaactactaaggtaacgcaagctgttcttcccgggatgctgaagagaaagaagggtgcgattgttaacatgggttctggagctgctattgttattccttcggatcctctttatgctgtttatgctgccaccaaagcgtacatcgatcagttttcgagatgtctctatgttgaatacaagaggagtggaattgacgttcagtgtcaggttccattatatgtggcaaccaagatggcatcaatcaggaaatcttcattc

SEQ ID NO: 25515 - DNA, 252 bp, Glycine max
  Clone ID: 701099302H1
cttcgtctcagatctctctttctctctctctagggtttccgcttctctctctgctttttatgatcactctctgacgcgcttctgtcaccaaatcaagtgcttccgtctcttccccttcttctctgattggaaggattcgtgtggtcggagatggtggtttcggggccaatcacgccggggcaggtgtctttcttgctgggggttattccagtttttgtttcatggatatattcagagtacttagagtacaag

SEQ ID NO: 25516 - DNA, 217 bp, Glycine max
  Clone ID: 701099304H1
ctggaacgtggtggtcttggttggcggttatgcccaagaagcatcagatcagcaatggcaacctcttctttcttcttcaccttgctattactgcttctcactgtttcagatttgtttgtgcaaagccgtggccttaattttggaatcaactacgggcaaatagccaacaaccttccatctccatctcgtgtggctgttctaataaaatctctgaatg

SEQ ID NO: 25517 - DNA, 270 bp, Glycine max
  Clone ID: 701099305H1
caattccctaaacatttttcttttccttcgaactccaattccctcaccagaacacggtcaccattgttttccctttcaacaacattcgccatcctttcgcgacgaagagaaaaaaaaatggggtgttagggtttcgattctctgcgacgctctccgcattgcgctaccctgcaccttcctcaccatatcgcgcgcctctctcactcccctactgtttttccgctccccaccccctctctctgtgttgcgaaaattagggttcataggttt

SEQ ID NO: 25518 - DNA, 270 bp, Glycine max
  Clone ID: 701099306H1
cattttctgggtgtgtcgaacgagggctcagcttaaagtttgttccttttttctcaatcgttttccctcacggcacattcttcttcttcttcttcttccaaaaaacaggaacattgatcctccgattaagaaaaagacattgtctcgtgctagcttgagtcctcagaggaaagacaagtgcatagtttttccccttgtgaggtataatgaattccgggagcctgtttgccaggcttgtaatgtggttatgttggagtctatacgtgcaca

SEQ ID NO: 25519 - DNA, 211 bp, Glycine max
  Clone ID: 701099307H1
cctattgttactttctctttttgtttttttataataaaaagattcagttttgtgtgttgtcgctgatatccatttgcattttgtattctgggtcaatgctgttcatgttctctgcaaattagggtttcaatccgtgctccggagtgattgattctgtttcatgtgctgaaaaggaatgtagctggaaaagattgtgtttgttctgaataaa

SEQ ID NO: 25520 - DNA, 274 bp, Glycine max
  Clone ID: 701099308H1
attgaaccttcgaagagcaccatggaccctgacgtcatcgagattcctcccccaattcaccaccctccaagattccgcgagcagaacaaggtcattttgcatgatgtgattgacattgatgacgactctgaggatgtagtgataattggtgaaaaagttaataatagtaacaaagggaagacaattgacgccgttcatgatgatcatcaagttgtgaaaacggctgattatacttactctctgcctggtgtggaaaattttggatcagttagtg

SEQ ID NO: 25521 - DNA, 269 bp, Glycine max
  Clone ID: 701099309H1
gctaatattcatatgagaactttgaaggccgaagacgggaaatgttccatgtgaacggcacttgcacatgggttagtcgatcctaagggacgggggaagcccgtctgatagcgctctgtgcgcgtactccgaaagggaatcgggttaaaattcctgaaccgggacgtggcggctgactgcaacgttagggagtccggagacgtcggcgggggccccggaaagagttatcttttctgtttaacagcctgcccaccctggaaacggctcag

SEQ ID NO: 25522 - DNA, 144 bp, Glycine max
  Clone ID: 701099311H1
gccaacgacgcccccgagggtcgtcgtttacgtccccgaaggtaaacgaccttaacgtgttgagctctttgcttcaactaacggatcacatatgttccctaaatctcacagccaccctcttaaaccgtgtttcctcttccacac

SEQ ID NO: 25523 - DNA, 274 bp, Glycine max
  Clone ID: 701099312H1
cagaagttgaagcagcgtttaaggttgtcgggccggcattgatttttgggttttgaaacatccttatctgtgttggactcagtccagtttgagagagaaagagagaacttgacacttgacagcgtcagacacgcgcctaattgattgttgtcctttgagctggtttctgcagtgtggtgtggttcattgcattgacatggcttctaaattcaagagtgtgtcctccattcggaagatcacgcatctgagcggtgatatggatcaggaggatgcg

SEQ ID NO: 25524 - DNA, 275 bp, Glycine max
  Clone ID: 701099313H1
caagaaaagaccatcaaagtttcacttcagccttatccggtttagggtttcggtttttgacccaacctttgacgtatcgaaaccttaagtttcggatcaggtctgagcaatctggttggtagaacctttggtcttagagagtcaagttttatgtctgaattagacgatcaaattcctactgccttcgatccttttgctgatgcaaatgctgatgactcgggtgctgggtcaaaggagtatgtgcatattcgcgtacagcagcgaaatggaaggaa

SEQ ID NO: 25525 - DNA, 266 bp, Glycine max
  Clone ID: 701099314H1
cggggctacccgctgagtttaagcatatcaataagcggagagatttgaacaaattaaaactcactttggctttccccacaatgacgagtttgtatgtaaaaagcaactaagtttccggttgtgaatcattaattaattagtactgttcttatatatctgcatactagtttgagtcaaagaagaaattaaggaaattaagaggtgatcaaagattattaattagctcttttgctgatgagagacacagtgaagttagttgtttatta

SEQ ID NO: 25526 - DNA, 282 bp, Glycine max
  Clone ID: 701099315H1
tcggagctctacaggaatgagataacaggaaagattcctaaggaacttggtaacttgaaatcacttattagcatggatttgtatgataacaagttggagggtaaaattccaaaatcatttggaaagttgaagtcacttaaattcttgcggctaaacaacaacaagttgacaggatccatcccaagagaactcactcgtctcactgatctcaaaatctttgatgtttctaataatgatctctgtggaacaataccagttgagggaaactttgaatctttccca

SEQ ID NO: 25527 - DNA, 276 bp, Glycine max
  Clone ID: 701099316H1
aggcgctgttctctcgtcttctacaaaattttctgttcgatctcaaccaaggttgttccttccaccgccatgagtttcatcttcggaaagcgaaaaacacccgcagagcttctgcgggaaaataagaggatgctggacaaatcaatcagagatattgagcgcgagcggcaaggcttgcaaacgcaagagaagaaattgattgcggagataaagaaaagtgccaaacagggccagatgggagctgttagagttatggcaaagctcttgttagaacaa

SEQ ID NO: 25528 - DNA, 269 bp, Glycine max
  Clone ID: 701099317H1
tatgagctacactacgctgcgagatttggaaattgaatccctaatctaatttcgaggtccaactcctgtggagtgtgtgtggtgctttcaatctgcatgatcatatagcgaatttgtgtttagcgaatcatatttgcagagtaaggatggggaaaaaccaagcctacaaagctatgcagagagccaggctcggcggcgcctccgccggccccgacgaggttgaagacggcatggtggatggttcatttcattcaccagaatggcatgca

SEQ ID NO: 25529 - DNA, 268 bp, Glycine max
  Clone ID: 701099318H1
tcattcaaaaggcccaagcatagcaccgagccaaaggtttccaaagttcttacacggacagatgcatctgatactggcttatatgtgagggacggatatcagtggagaaaatacggtcagaaagtcactagagataacccttctcctagggcttacttcaagtgttcatatgcccctagctgtccagtaaaaaagaaggtgcaaagaagtgtagaagatccaagtgtgttggtaacaacttacgaaggggagcacaaccatgggcaac

SEQ ID NO: 25530 - DNA, 239 bp, Glycine max
  Clone ID: 701099319H1
gcttatgatctggttgttggagttaatttgtatcatgtggctttgtttggtttaattaatttcctttgtgagcaagtgtcggttttatttatgtaacatttttaaagtgttactattataattcggtgaatttggttgagtatacgtatgaaaatgtgcgtgtgttggtgttgacgtgtttggtcatttgtattctgcagtaaatatattactataatggagaggaatcttaattagta

SEQ ID NO: 25531 - DNA, 244 bp, Glycine max
  Clone ID: 701099283H1
cgttcgcaaccaccggccatactcactgttgttctcaagggattcgattctctctgcactcacttctagggttttctctgcgctataagcaatcatggcggatgaaacaccaaatgagatgaaggaggaggttccagaaattgttccttttgatcctaccaagaagaagaagaagaagaaaattacaattgtagatcctgctgatgaacctgtggagaaattggctgagaagacagaaaacctc

SEQ ID NO: 25532 - DNA, 203 bp, Glycine max
  Clone ID: 701099232H1
ttgaactctttcaactaatgtgtcgatttagccaatttcaacgtttgaatttttcaggcattcattcattagtttcataatctcggacattcaacaagggtttgattcgtagtgtgagtatggtgggttttgctggaagatttgtatcacagtatatctgtacatgcaaataattctgcggtgtacctctactatcagtcact

SEQ ID NO: 25533 - DNA, 263 bp, Glycine max
  Clone ID: 701099234H1
attacactaatcaccatgaacagatttcatagtaaaagacaactcttgatcttcctggtggtaatcccaagcctagtcgctgccgagtgcacgtgcgatgaagaagaccaagagcgagacaaatcaaaagctttaaggtacaaaatagcagctttaatatcaatactagttgctagtgcaatcggggtgtgtattccacttcttggcaaagttatacccgccttgagccctgagaagaacatattcttcatcattaaggcctt

SEQ ID NO: 25534 - DNA, 260 bp, Glycine max
  Clone ID: 701099237H1
aaaatgatgctcagaatcaagagggttcccactgtcgtttccaactaccaaaaagaccacgctgcagactctcctcgtcccgtcggaggttgtggtcggaattgcctcaaagcttgttgccttccagatgcaaagctgcctttgtatgctttcaagaaggctaatggaaaggatttggccctgcatgcatgcgccggggagcctcccctcacattcctcgactcacttcttcttggagagtgggaagatcgcatgcagag

SEQ ID NO: 25535 - DNA, 257 bp, Glycine max
  Clone ID: 701099240H1
attccttctctctctctctctctcccctccgccatggctgaggataaggagatgtctacctctgtcatcaatgggaatgattccctaactggacacatcatatctacaactattcggaggcaaaaatggggaacccaaacagactattagttacatggcagaacgggttgtaggaactggatcatttggaattgttttccaggcaaaatgcttggaaactggggaggcagtggcaattaaaaaggttttacaagaca

SEQ ID NO: 25536 - DNA, 257 bp, Glycine max
  Clone ID: 701099241H1
gttccctgttatttgcaggtgtctaaggagggaacttcaccatttacatatattattgtggacaaccaaacgaagacccgcacttgtatacataccgcaggatatcctccaatgataccagacgaactgtcaaaatcaagtttattatctgccttggatggagcaaaatttgcttattttgatgggaggttgcctgatactgctctagttgttgcccaagagtgcaggcagttagaaagaatatacccatcttaata

SEQ ID NO: 25537 - DNA, 183 bp, Glycine max
  Clone ID: 701099242H1
ctcgagcgcaaatccacttctccaactaatgggcgtgttcagcgaagatccgaatcccaacccgaacccgatcgtgatccgagaggtttgggcctccaatctcgaatccgaattcgaactcatccgcgaactcatcgatcgctacccttttatctcaatggacacagaatttcccggtgttat

SEQ ID NO: 25538 - DNA, 251 bp, Glycine max
  Clone ID: 701099244H1
cacgacttgttcaccgatcagagctgattttcgcggctgttaccggtcaccggagattctatccgaaatcgttttccgatgacgataaaaactgttaaagtcagtaacgtttccttgggagcaactgagcaagacattaaggagttcttttcattttctggtgatattgaatatgttgaactacggagccatgatgaacgatctcaaattgcttatattaccttcaaggattcacagggagctgagactgc

SEQ ID NO: 25539 - DNA, 256 bp, Glycine max
  Clone ID: 701099247H1
ctaaaccttcttcaataagaataataatattctctctttgttcctctctctaaaattaatggctgaagcacaaagtggccaagctagtgaagggattaaactgtttggaacaacgattacgttgcatggaagagaaagaaaagaagatagaaatgatagtgaagatgggacagaggagataaagagacctgataagatcataccatgcccaagatgcaagagcatggaaaccaagttttgctacttcaataactac

SEQ ID NO: 25540 - DNA, 255 bp, Glycine max
  Clone ID: 701099248H1
ggccttctttgaggaaccaattatgctagttgcatttgtcttgttaggaaggactctcgaacagagagctacgattaaggcagccagtgatatgacaggacttcttagtttattgccaccaaaagctcgccttcttttgaacaatggggaaacagaggttggctcggttgttgaagttccttctgacagtctttctgttggagaccaaattattgtattacctggagatcgtatttccagctgatggagttgtga

SEQ ID NO: 25541 - DNA, 265 bp, Glycine max
  Clone ID: 701099249H1
cggctcgagcggctcgaggaatgaaggaggagttggtggttgaagaagggtaccttttcaaagaagagactcacttcacagtgctcaaaacctctctcttcttcaacggtgatggcttcgctgtctacgattgcaaaggccaactcgttttccgcttcgactcctacggtccccgcgcgcgtgacaaggacgagctcgttctcatggatccccatggccgttctcttctcactctccgccgaaagaaaccgagtcttcatcaacg

SEQ ID NO: 25542 - DNA, 261 bp, Glycine max
  Clone ID: 701099250H1
gcggattctcagaatccaaagccttgacccaacgagttgagctcttcaaaacctacggaagcacccttgccggcttaagagcacaaggcctcgatatcactgcagaggactaccacggtttcgtgcacggaaggctaccttacgactccatcgacactgatcatcagttaccgaacctcctcttgagcatcaaacaaagaaaaattgtttttactaattctgacaggattcacgcgatgagggcgctggataggcttgggg

SEQ ID NO: 25543 - DNA, 183 bp, Glycine max
  Clone ID: 701099252H1
gctccgtctcaattggataccttccactgtcttttcctttgtccaaaagttatcccaggagattgcttctacaatatcagttgcaatgcgtgcaccagcattacttgcgcagtgcttacctggcctagtgcctcatgatcgtggaagtctcagcatatcgtccgttcctgagaaagattttca

SEQ ID NO: 25544 - DNA, 254 bp, Glycine max
  Clone ID: 701099255H1
ccaccatttttctatccccttacttttctccaccgtggtctagcccctctttctcttcaccgctccagttctgagatggaaagagaagtaaaatagaaaatcacaaccattacttaacaagataataatatgtttgacggtgtacatttttgtgggatacctaattgactctcctaccctaaccagagtcacctttcctcgttacttcttctatctgccctagtctctgttctcacatacatctgattagcctt

SEQ ID NO: 25545 - DNA, 254 bp, Glycine max
  Clone ID: 701099257H1
ctgcaattacgatggcgcccagggacaagactagtgccgttaagcctagcggtaacgccggggtgaaggacctgcattttcgtggagtcaggaagagaccgtgggggacgttcgccgccgagatcagagatcccgccaagaagacccgcgtctggctcggaaccttcgacaccgcggaggaggcggcccgtgcctacgacgccgccgcgcgggagtttcgcggccctaaggcgaagacaaacttccctctccct

SEQ ID NO: 25546 - DNA, 141 bp, Glycine max
  Clone ID: 701099259H1
atcgcagacagacacagagagtgagagagggagatggggagcgacaggagcgcagagaagtcggtgcagaaagagaaggagaagaagaagatgttggccctggctcccattgctaaacctcttgctgggaagaagctttgc

SEQ ID NO: 25547 - DNA, 252 bp, Glycine max
  Clone ID: 701099262H1
cgccaagcgaacacttgactcggccacccaattcatatggaggatctttcagcaaaacaacccttctgacagaaaaaatgtgcagaaggtaagcttattcgttgatgacatggatggtgttgcatatactagcaacaatcaaatccatctcagtgcaagatacgttggaaacaataaaggggacgtgaaaacagagataacaggtgtgctgtaccatgaaatggtgcacgtttggcagtggagtgggaatgg

SEQ ID NO: 25548 - DNA, 154 bp, Glycine max
  Clone ID: 701099265H1
ttcaattgagatgggtacttaaaggggattaatttcttcttttgcttctacattaagatcaacagtcgtttgactcaattggaatcttgtatatttggggtcatggataactcaaatgattcatcatcatccttgagttttgtatcatctcgac

SEQ ID NO: 25549 - DNA, 259 bp, Glycine max
  Clone ID: 701099266H1
gagagaagagcggaagagaaaatgacgaccaggttcaagaagaacaggaagaagagaggtcacgtcagcgccggacacggccgtatcggaaagcaccgcaagcatcccggaggtcgcggtaacgccggtggcatgcatcaccaccgtatcctcttcgacaagtaccatcctggtttcttcgggaaggtaggcatgcgctacttccacaaacttcgcaacaaattctacaatccgatcatcaacatcgacaagctgtggt

SEQ ID NO: 25550 - DNA, 247 bp, Glycine max
  unsure at all n locations
  Clone ID: 701099268H1
tcaaattggtctcttgtcttcctcctcatctctacactactccacatatccnncagcctctcaagcccaagcccaagcccaagcccaagcccgttcataaaatcctcctgcagaagcacccagtacccagccctctgcgtctcatccttttcgtctaggcctcaagcatccaacaggaccctcaccaattggttaagcaagaattctccctttccttgaacggcacccaagccacaaaaccttcgtg

SEQ ID NO: 25551 - DNA, 252 bp, Glycine max
  Clone ID: 701099270H1
tagaaaccgatgctgccacactcattcttcttcttcttcagcttttaccactctctatgagaactcttctttcttgatgctatgttgatgactggataaaatctgagacagaagggtagtttctagaaacttgacagagctaattaagagaatcttggtatttatagctgtttttcaatctttgcttacaggaagtagattactttattaactgggtaataagtcgttgtttggaggctatagatggcgatg

SEQ ID NO: 25552 - DNA, 239 bp, Glycine max
  Clone ID: 701099274H1
ctcgagcggtttttgcctctgttatggcgacacttggactgcagataatcttggagtctacccgcacattaatatcttctgaaaatgcattcaacttgaccaaggaacaagagcgctgggttgtgggcattatgctttcagtgactttggtgaaattcctgctgatgatttactgtcgttcttttaccaatgagataattaaagcctatgcccaggatcacttttttgatgtgatcact

SEQ ID NO: 25553 - DNA, 81 bp, Glycine max
  Clone ID: 701099275H1
tgaattcggacacgacttcctattggtgctacagctgcacgcgcttcgttcacatacaagaaccagacgaacgtccgtttg

SEQ ID NO: 25554 - DNA, 250 bp, Glycine max
  Clone ID: 701099277H1
gcgggcagccccaaaaccaaggaaatcgtgaaccagttcgcttcagaccagaaactgttttttaagaaattttccgatgcttttgtgaaggtgagccagctagatgtgataacggatcgtattgggaaaggggagattcgtgataagtgctttgttgcaaataagagaagatcttctatggcgtctgtggtggaagaagtagtggaattggctcaggagatataattgtattgggtccttttgctcaggg

SEQ ID NO: 25555 - DNA, 251 bp, Glycine max
  Clone ID: 701099279H1
tcgaaatcggaagaaggattagggtttgtggagatgcaagggcaaggcgttgatgaagtgagcatagaagagttggcgtcgaatctttccctctacaaagatcaactgaaccaggttagagaactcttaaacgatgaccctgcaaattctgaatatgttgacatggagagggaactttccgaggtcattgccttgaccgaggaactccttgcaactgcaaagcagaatgaaatctctgctcctcctaataa

SEQ ID NO: 25556 - DNA, 258 bp, Glycine max
  Clone ID: 701099281H1
gcggcggcaacagggagagaagatgaagttcaatccacgtgtgtcgagcagccgccgcaagagccgaaaggtcatttcacggcgccgtcgagcgtgcggcgggtgcttatgagcgcacctctgtcggcggactgcggtccaagtacaacgtgaggtcgatcccagtacggaaggaggacgaggtgcaggtggtgcgaggaacatacaagggtcgcgaggggaaggtgactcaggtctaccgtcgaaagtgggtgattc

SEQ ID NO: 25557 - DNA, 254 bp, Glycine max
  Clone ID: 701099282H1
tctatatccaatctgcatcatccagaatctagtttctttctttctttgtcatctcaggttattcaccagtttgagttttccaatctcctccactgtttcttctcctgatcctgttcagaatccaaggagcttgggaacaaactcctgctccttcttcaccctgttaccagaggcaccacttctggtttattgataggcaatgggacgtgcaatgggaaagattgaatcacccaaaaagggatcagtgccagaaa

SEQ ID NO: 25558 - DNA, 256 bp, Glycine max
  Clone ID: 701099231H1
gaagcctccaggtttccttcttctaaaggaagtaaatatataataaatcagcaggaggaaatatctcaacagcatgctaatggcaatagcttggcagataaattagggttttccaattcaagctacagggaggacccatcttctggaagctttttgaatgctctggcaaagccttgggagaggccaattgggagtgctgaccagcgtattaacagtggtcaagagggccttacttatgatgacaactctagacatg

SEQ ID NO: 25559 - DNA, 245 bp, Glycine max
  Clone ID: 701099189H1
ctctcaccctcctcttcacacattttctgtgcgctctaacaaacattctcgttcacactttcagattgtgtgaagatgggggcgggtggccgaactgatgttcctcctgccaacatgaagtcagaggttgaccctttgaagcgggtgccatttgaaaaactcccatttagtctcagccaaatcaggaaggtcattccacctcactgtttccagcgttctgttttccgctcattctcctatgttgt

SEQ ID NO: 25560 - DNA, 246 bp, Glycine max
  Clone ID: 701099191H1
tagaaacctctcagcccctctccgatcaaatggccaccgtaatcgacggcaaagcgttgcgcaaaccatccgatctgaaatcgccgacgaggtgcgccagtctctcaaaaatacggcaaggttccgggattagcggtggtgatagtagggaacagaaaagattcacagagctatgttggaatgaagagaaaggcatgcgctgaattgggaatcaaatccttcgatgtggaccttcccgaacaagtc

SEQ ID NO: 25561 - DNA, 249 bp, Glycine max
  Clone ID: 701099195H1
aaaacatatatacaacatagttctcttcctagtcttttccttaaattacaacaacttttcaatactcaatctacttaatcatatagcaataataacagctatggataatactccaagattgattcaaacggtttcaagcttggttctgattctaagcatttcatcattggcctcggcatctctgaaagtgggtttctacagctcaacgtgtccctctgccgaggcaatagttaaaagcacggtagaaaa

SEQ ID NO: 25562 - DNA, 257 bp, Glycine max
  Clone ID: 701099203H1
ctcactcaagggttagggatgcgtcggaacagccctgcatactacagttctccgcggcgaggatacggcggtggtggccgaggaggaggaggaggaggaggaggaggagggtccggcaggagggggttcggtggaggcaggcgcagggacagcaatgggagcctcttggttcgtaacattcccctcgattgcagacccgaggagcttcgcgtccctttcgagcgatttggacctgttcgtgacgtttacatacccaa

SEQ ID NO: 25563 - DNA, 264 bp, Glycine max
  Clone ID: 701099204H1
agagtcttttcgggaagcaagagagggttctctccgttttcaatagatctctcactgtcttcttttgagggggaagccggggcctcggcctcggcggctttcaaagcccccaccttcacagccctatcaacaaaaccctaaccctatttttttcttcttcattttctaattcaattttgatcgtcgccgtcactagagatgcctgtcctggcttgttgcgtggatgctgcagcacctcccggctatgcatttgccggtgacatc

SEQ ID NO: 25564 - DNA, 262 bp, Glycine max
  Clone ID: 701099205H1
caagaaccaacaaaaggtgttgttcattgttgtagttgtttgtaactgtagcaacaggaagatggttggaaagttggttgtggtgaggcttgtgttggccatatctgtgttgagctctctccttctgacaacctcggcacagacagcatgcaagggccaggccttcaccgaaaacaaggttttcaccacatgccgtgatcttcctcacctatcctcgtacctccactggacctttgaccaggccacagggaagttggacata

SEQ ID NO: 25565 - DNA, 132 bp, Glycine max
  Clone ID: 701099206H1
ctctttgacacaaggaagaagcctaacaacattaagctctatgtccgccgtgtctttattatggacaactgtgaggagttgattcctgagtatttgggctttgtcaagggtattgttgattctgaagatctc

SEQ ID NO: 25566 - DNA, 261 bp, Glycine max
  Clone ID: 701099208H1
ggtgaagtcaaggttggtctcttctggtctgttctgttcttctacgcagacacataacataacacaacgcacctcttcttcttcttctttcccttcaaatttcaacttcttcatccattttgtgctccaaacagcacaaacactgcaatcacaccgtcttcgctttctactcatctaaaagatagaggttcatgggttgctttggcttctgcaaaggagatgatagtgttacagttgctgacagaggacctttcatgcaaa

SEQ ID NO: 25567 - DNA, 260 bp, Glycine max
  Clone ID: 701099210H1
agtcgcgttgtgttgcgtcgtgtcgtgcgctgttcctctgtttctcgtttttgtgttcagaccgaaccctagctccgcatcgcaaccatgtcgaccaagcaaggtggaaaagctaagcctttgaagaaacccaagtctgataagaaggattacgacgagattgatgtggctaacattcagaagaaaaaggaagaggagaaggcgctaaaggagttgaaagccaaggcgcaacagaagggaagctttggaggttctgggct

SEQ ID NO: 25568 - DNA, 258 bp, Glycine max
  Clone ID: 701099211H1
cggaacctcaacatgacatgaaaggtaagaagctctggtgaactcaactcactcgtggtaagacagaagaagaatatcgtttcgctcttaccttcttcaccttcattctctctctagagaatggaaccggaatccggaacttccacttctcggaatccttcgcagttgtcatgggtgaatctgtctagaaatctgttattagcgtatcaaagctttggtgtggtgtatggagatctgagcacttcacctctctatgtc

SEQ ID NO: 25569 - DNA, 258 bp, Glycine max
  Clone ID: 701099212H1
cggctcgagaagcaaacgataagaaatgttatcagaaacattggccatccctgcagtactccttgtaatactcattttgattctatcctctgtcttgttccatcttcaagatgaaagaacaaatccaccaggtcctaaacccctcccaattattggtaaccttcacatgctggggaaactcccacatcgttcccttcaagcccttgccaaaaattatggacccataatgttcataaagttgggacaagtcccaaccgt

SEQ ID NO: 25570 - DNA, 258 bp, Glycine max
  Clone ID: 701099213H1
gcttagattgatttgtgaatttcgcaaagtgtagaatagcaccagctcgataagctagagattgagctagcccaccgagcaaaccttcagagttataactagctagctaattaagccagtagcacccctaccaagcgacacattcatagcttctctttaggtttgtattcaacaaaatccatggctaagttagaggctattataaataaactcaggcgagtaaccagaatttattttagagactagctatagcaaggc

SEQ ID NO: 25571 - DNA, 255 bp, Glycine max
  Clone ID: 701099215H1
ctcgagcgctcgagccgcttcttcttattctttctttttctccttctaattctttgctaccctttccctattacaaggcactcacactaacccaataaacatggacctagcacatgttttccttgtgtgcttcgttcctcttcattgtcctcttcagggcactcatcaaaccttattatgtctccaaacgccgtgacttgccactcccacctggctccatgggttggccttacataggagaaacctttcaaatgt

SEQ ID NO: 25572 - DNA, 258 bp, Glycine max
  Clone ID: 701099216H1
ctcgagcgcgcgaatggcgaacacagaaggcgtcactagcctttggagaggctcatcgcttacggtgaaccgcgccatgctcgtgacggcgtcgcagctcgcgtcgtacgaccagttcaaagaaacgatcttggagaacggcatgatgcgcgacgggctcgggacccatgtcacggcgagcttcgcggcggggttcgtggcggcggtggcgtcgaaccccgtcgacgtgatcaagacgagggtgatgaacatgagggt

SEQ ID NO: 25573 - DNA, 262 bp, Glycine max
  Clone ID: 701099218H1
ggagcagaggaaaagcgtgtggtgtcttcttctccggtggatcctcaggcctgtaatttgggattagccactcatgaatcaaaatcaatccattaaatcaaaatacctttctcactgttaactcatcaacaatacctaatttttttggttctttttttcacacttacacatatccactttctcttcctcgtacatataaaaggaagaagcaaagcatctttttcttttttcagtattcacgcctctgcccgcttaattttac

SEQ ID NO: 25574 - DNA, 256 bp, Glycine max
  Clone ID: 701099219H1
ctctcttcttcacttcctctttactattcgttcgttctggattcagttgaggaaaaaaaactgcgtggtttgagcaatggatgttaaagctgcacagaggttacaactttcagcggtggttcaacccgaaaggtttgggagaagaccaccattcagtacatgtcgtttgggtgtgtctcgggaaccgcagagccttcgggtttttgtttcgccaatgatgatgcggcgcagaacaaccgctttggaggtttcctct

SEQ ID NO: 25575 - DNA, 258 bp, Glycine max
  Clone ID: 701099220H1
ggaggatggaaagaaagtgaataaccttctggaaatgaatagaggggaaggagtccatgatggtttttctggacctggaccaaatgattcgcttcttcctggtcttattgatgatgttgccttgaattgtcttgcttggcttagtggatccgattatgccgcactatcgtgtatcaataaaaagttcaataaactgatcaatagtgggtatctatatgggttgaggaaacaattgggggctgtggagcatttggtgta

SEQ ID NO: 25576 - DNA, 261 bp, Glycine max
  Clone ID: 701099221H1
gaagatcctctgtcaaaaagatccaaaacccttttcttatccattgttttgtttcctttcatcactcaaatcttagaccaactctgccatatcgagtcttttatgtgcttttacagctaagtctgttgctgaaaattggcacaactcgaagctcccaagtgcatgcagctcaggttcaaggtacatagaaccaacacgccatcagtattctctgaacttgcatgacagctacttgcttttctcatcccaaggtacatacta

SEQ ID NO: 25577 - DNA, 254 bp, Glycine max
  Clone ID: 701099223H1
ctaaatcataacttgaacttatgtgatgaattagttgttccaggccttgctggaacaatgaatcgaaggagtgcagaaggaaggatttggaagtaccgaaatggtaccttttggatttggattcctttcggacaattttgtcatagacatgaaacatattgtccacaatggttgtattgtggatactgtaaattcttctgctaattgattccctcctgcatttttaatccatggataactcatatagccagatg

SEQ ID NO: 25578 - DNA, 255 bp, Glycine max
  Clone ID: 701099224H1
ctttcttcctttgtaatagaaagcacgcgtttctctctctccctctctcaacgaatatttgtgtacttcctcttttgtgggtagattcaatttaccatgtcgagttcatcggaatactctcaattttccggccagaaaccggcgaggtcgccggagaaatcgagcttctctcagacttgtagcctgttgagtcaatacatcaaggagaagggtagcttcggagatcttaccctcggaatgacatcatgtgggtca

SEQ ID NO: 25579 - DNA, 256 bp, Glycine max
  Clone ID: 701099225H1
gctagatacacaagcctacggtgatcatacctgtataataacaaaacaacatttggaacctaacttgggtgggctcactgttgagcaggctatccagagcaagaagctgttcatcttagatcaccatgactatctcattccatatttgaggaaaataaatgcaactaccacaaagacttatgctaccagaaccatatttttcttgaaaagtgatggaactttgacgccattggccattgagttaagtaagccgcat

SEQ ID NO: 25580 - DNA, 180 bp, Glycine max
  Clone ID: 701099226H1
ttggacttgagacatacatgcaactagaactacattatagagtttagtttgaactgtttgtgattaggtgacctgtcaatcaaccctcttgtttatgttgggtttttatgataaaaaccagattttggatatccaatttttttttcactctaattttcaaaatgaattccttttgaattg

SEQ ID NO: 25581 - DNA, 270 bp, Glycine max
  Clone ID: 701099227H1
gccactgctaggtgacagcacatcatctggaaggtcgaagatttctgcataaacagcgaatgggtgaaaccaatttggttacaggagtccaagaggaagaccaggagggcatttattgggaaaccccagagcacttagaaggttgaggactgcttgtaagagggccaagagaacactttcatggactgctcagaccaccattgaaattgattctctatacgagggaattgatttctactccactgttactcgtgccagatttgaggagct

SEQ ID NO: 25582 - DNA, 256 bp, Glycine max
  Clone ID: 701099228H1
gctgcactctcttttatccctcaaaaaccaaaaccctaatggcagatcgcggaggtggcgaccgtggcagcgaccgtggcggtttcggacgcggctttggtgggcgagggcgcggaggtgacaggggccgaggccggcgccgaggtccccgccgcgaggaagaggagaaatgggtcccagtgaccaaactgggccgcctggtgaaggagggaagaatccgaagccttgaacagatctacctccactcgctcccgat

SEQ ID NO: 25583 - DNA, 254 bp, Glycine max
  Clone ID: 701099229H1
cctttctccttctaacgagtgaggaaaaatggcgcgtaagaagatcagagagtatgactcacagaggttgttgaaggagcactttaagagactctctggcaaggagttgccgatcaagtctgcacaaattaccgcaccaactgattccactgagctacaacagcaggaaccctggctttcatcttctaaattggttgttaaacctgacatgttatttggaaagcgtggcaaaagtggtttggctgccttgaatt

SEQ ID NO: 25584 - DNA, 241 bp, Glycine max
  Clone ID: 701099188H1
ctcgagaagagcatgaggatggggaacatgataacaaggctgagagtgaaggtgaagccgaaggaatagctgatgctcatgatgttgaaggtgatggaatgccattgccatattctgaacgctttctactaactgtgaagcctctagcaaagcatgttcctccgatgttacatgagaaggacatgaattcacgagttttctatgggaacgattccctttatgtgctgcttagacttcatca

SEQ ID NO: 25585 - DNA, 253 bp, Glycine max
  Clone ID: 701099154H1
attgaaatggataaacattcttacaaggaaaaagtgatggagaagcaatctaaatctgatgtcattccgactttgagccagagtcagagttctgcaactaaagtgcattatccaaaccctgattcttctgcggaccttaaatttcctgtcttggatgttaccaatctagaggaactatctcgcttgaatatttccactgctatgaacaagtctaatgcaataacacctgaaggaagaggtcaaaacctggata

SEQ ID NO: 25586 - DNA, 253 bp, Glycine max
  Clone ID: 701099155H1
ctctctctaaccttttccccaaaccaacttacactcaaagaaagcttgttctccttctgcctagtaagaagcaacttgttttagaaagaaaagaaaaacagtgtcattgctctttggcacaataagataatagaaaatggaaagcgacaggaattgggagcagaccgcactcatcagtgagctaattcaggggttggaggtagcaagaaagttgaaggaagacttgagttcagcctcttcggttgacgctagg

SEQ ID NO: 25587 - DNA, 251 bp, Glycine max
  Clone ID: 701099156H1
tggaggtattggaactgtgccagtgggacgtgttgagaccggtgtcttgaagcctggaatggtggtgacttttgcaccaactggactgacaagtgaagtcaagtctgtggagatgcaccatgaatctcttacagatgcacatcctggtgacaatgtgggattcaatgtgaagaatgttgctgttaaggatttgaagcgtggttatgttgcctcaaactcaaaggatgaccctgcaaaggaggctgctaact

SEQ ID NO: 25588 - DNA, 251 bp, Glycine max
  Clone ID: 701099157H1
ctcacaacacaacccctttctcttctcttccaattacaaatcccttcttctctctctctctctttattctcatttcacaactcatcaatcccctctctctctctcccaaacgcaaaacctaagcatggctcagaaggcccagaaaaacgacactgagtttaaggtccccgaacccatcatcaacccctgcaccaccaacaccaccaccaccacctcgatttccgaaccttctagattcttcgatgcgacca

SEQ ID NO: 25589 - DNA, 249 bp, Glycine max
  Clone ID: 701099158H1
tttgagtttgaatttgatttggacgaggttggaggtttgcaatttccttcggttgtgacctgtgaatccgattgtattctgaattagggtttaagctttacacacagagatgggtagcccctcgaagaagaacgaaagtaaggggtttttcgccgccgtgtcttccatgttcaccagcgctgtcaaccgatcggtcaacgggcttagtgtagaagtcataaatccagatggaggtaaagaagattcgga

SEQ ID NO: 25590 - DNA, 251 bp, Glycine max
  Clone ID: 701099162H1
gcgtacaatactagtggctaacacttcaaacatgctagtggctagtcgtgaagcttcaatttatacaggagtcacattagctgagtatttcagagatatgggttataatgtcagtatgatggcagattctacatgtagatgggcacaagcattgcgtgaaatctgtggacgagtggcagaaatgcctgcagatagtggatatcgtgcataccttgctgcacgtttagcctcgttctatgaacgtgctggga

SEQ ID NO: 25591 - DNA, 255 bp, Glycine max
  Clone ID: 701099163H1
cccctcctgtccgccacttctgaatctattgagtcaacaatcatgtcggacgaagacgcaccattacgagtccaaggccgacgccggagcctccaaaacctaccctcagcaagccggtaccatccgcaagaacggctacatcgtcatcaaaggccgcccctgcaaggttgtggaagtttcgacttccaaaactggaaagcacggtcacgctaagtgtcactttgttggaattgatattttcactgccaagaaact

SEQ ID NO: 25592 - DNA, 260 bp, Glycine max
  Clone ID: 701099164H1
ctcgaggcactacataacgctgccatctccagagtcatgtttggagaccaatattccatctctcgttgcgtggttccatccctatccactcttcctctcagagccatgcacaaaggaaaacacgttgagctgaacagaacggttatggtggtaaaggcaaagactaatagtgattttcatgactcagacgttgacatttctttgagccacagagttaatgctgtgaaactttccaaaactctatccatatgtgatcatgc

SEQ ID NO: 25593 - DNA, 262 bp, Glycine max
  Clone ID: 701099165H1
tgaagttcctggtcaaaatgtctatgcatacttttatccaccaactaatcctgatttccaagctagtgaagaagaaaagcctccattattattgaagagccacggtggactaactgctgaaacacgtggaattttaaacttgagtattcagtactggactagtcggggttgggcattcgttgatgttaattatggtggaagcacaggttatggcagggagttccgagaacggcttttgggacgatggggaatagttgatgtc

SEQ ID NO: 25594 - DNA, 252 bp, Glycine max
  Clone ID: 701099169H1
ctcggttcctgcaacggactcctctgtatatccaacgtcgccgacgacatcgccttttggaacccctccctccgccagcaccgtattcttccctctttgcccctcccccgccgccgcctccaccccgacaccactctcttcgccgcccgcgtctacggcttcggcttcgaccatacaagtcccgactacaagctcgtccgcatctcttacttcgtcgacttgcaggaccgctccttcgactcccaggtcaag

SEQ ID NO: 25595 - DNA, 247 bp, Glycine max
  Clone ID: 701099171H1
gtggccaagtccggggtgacggataagaggtgggcgtgcgggcttgtgattcaggccctgatggtttcggagtcggagtcgagggaatattcaagccggatctcggagagagccgtttcggttgtggaaatgtggaaggagcatttggatggagaatccgcgagtggtgctgccgaagtggtcatgtttctgcagatggtcgtttgtttcggcttgaggtctaggtttgatgatgagtatttgagga

SEQ ID NO: 25596 - DNA, 250 bp, Glycine max
  Clone ID: 701099172H1
gctatgggtacgcattgacccctcgtcatgatcccagcatatatgctgctgcttatggggcttaccccctttatggaggccaccaacaacaagtaagctggacgaagtgcagtacagtgctggagtaccattcacaacaagttagacagtatcgagcttgaatgtgcgagttaagtttgtctgttttaacttgcttgatgtgttgaattcttaagacaagaatccctcctaattgtggagcggagatgaa

SEQ ID NO: 25597 - DNA, 244 bp, Glycine max
  Clone ID: 701099175H1
ctcatttttcttcggatacatggcctgtatatgctacggtttcttcttaatgcttggaactgttggattccgtgctgctttgctctttgtccgccacatttatcgatccattaagtgtgagtaggcattttgtcctctcaagtccactagagcaattgtcttcatttcatagggaattctgtagaaaaattatagtaattttgcagttcttttgtgtactataagggaagctgggttgggtggg

SEQ ID NO: 25598 - DNA, 248 bp, Glycine max
  Clone ID: 701099177H1
agctaattcaatcaaaatgcctcccaaatacaagctagtgctgttgatagcattggttttggttgcaacctcccttgctggtcgcacaaaggaacatcctaagcatcctccatcccttcaagaacaacaacacaccccacaccttgatagctacccgcataaacacataccacctcatcctgtacatggtgccggggaggaaccaacctccattccacgaaagaacggaccaagaaggcccccgaact

SEQ ID NO: 25599 - DNA, 249 bp, Glycine max
  Clone ID: 701099179H1
gtgaaatcgaaaagggctcttcgttgaatttgattgcgtgtcaaatatgttatatgatcatgccgctttgcagtttctgcgctgttcataaaacccttctccgacaacttgtagctgctgctgctgtttctctttcattttttttttgctaaggactcaaggaatacaacatcctgatatttggaggacagattaaagagaaacatcgtggaggaaacaatggcagcaaggtattggtgtcacatgtgc

SEQ ID NO: 25600 - DNA, 249 bp, Glycine max
  Clone ID: 701099180H1
caagcacaagcacaagcacttctctaattccctttcacactctattacagatttcacaagtgcttacacttcaaatggctttggaagcccttcaatcacccaccacagccactccatcgtttagtcccttttatgataccagtctcagttacttagagacaccgtggacgataggaaagcgttctaagcgtagcgcacggagcaacaactgcaacacccttcatgcaccgaggaagagtacctcgctct

SEQ ID NO: 25601 - DNA, 260 bp, Glycine max
  Clone ID: 701099182H1
cacgccaccaagcgcacaacaaagatcatgggtgttaaagttccttcaagcatacttggaattcacccattgcttttcattagacgttttgcagatgtgccagtggcgttttcctccagatgttcctcccccttataagggatacagggatgaggactggcaagacaatgatggagcactaaatacaatatccatgactcatcctcgcctcccaattgaacaccccaactgcttggttgaaaaggaatcagactgccaac

SEQ ID NO: 25602 - DNA, 252 bp, Glycine max
  Clone ID: 701099183H1
ggttgacctccctggtggaggcttccgagcccactgcaaaggtgcttctgaaataattctggctgcttgtgacaaagttctcaactcaaacggtgaggttgtaccccttgatgaagaatcaactaaccatcttaaggatacaataaaccagtttgcaagtcaggcccttagaactctatgccttgcctatgtggaattggaaaacgggttctctactgaagaccctattcctgtttctggatatacatgcat

SEQ ID NO: 25603 - DNA, 253 bp, Glycine max
  Clone ID: 701099184H1
gcctcagactatcaagattaaccaacctgaccaggcaaccagtggtggtcaacctgcgcaaaagtcggcttgctgtggttcatgaaacgaatcagtatctgtagaaagaggtgcacaggtttctgcaatagcactcatctgggtgctaatgttattctgatgacattataagtgggagcatgtatttgtccctctgtatctcccaactgcagatgtcttattttaaagttaatattttaaattctttgctcac

SEQ ID NO: 25604 - DNA, 247 bp, Glycine max
  Clone ID: 701099185H1
tcgagccctaaacaactctttctcttcttccttcgctcgttgttctccctcgcgtagatcgacaatggcggagacagagacgtttgctttccaggctgagatcaaccagctcctcagtctcatcatcaacaccttctactccaacaaggagattttccttcgtgaactcatcagcaacgcctccgatgctttggacaagattcgatttgagagtttgacagataagagcaagctcgatgctcagcca

SEQ ID NO: 25605 - DNA, 251 bp, Glycine max
  Clone ID: 701099186H1
aaaaaaaaaatacactcaaacatggagggctatgagatcctcaaagatattggttctggaaattttgctgtggccaagcttgttagagacaactgcaacaatgagctttttgctgtcaagtttattgagagaggccagaagattgacgagcatgtccagagggaaatcatgaaccacagatcattgaaacaccccaatattattagattcaaagaggttctgttgacaccaactcatttagccatagtaat

SEQ ID NO: 25606 - DNA, 250 bp, Glycine max
  Clone ID: 701099187H1
tgagactgcaaatgctgcaattctccggctcaccaaagagattgcatggtatgaagataatctggcagcagaatcttccatgagaactggcccaccatctacatgtgcagatcgcgtgtttgccaatgagattaacattgctgtccagacaactgaccacccgtacaccaagtagatgtttcgagaagctctcaagactggcttttatggtcttcaggctgctagggatgagtatagattctcatgtggg

SEQ ID NO: 25607 - DNA, 254 bp, Glycine max
  Clone ID: 701099152H1
caggtctgtgatgcccttagatgttctgggccgcacgcgcgctacactgatgtattcaacgagtctatagccttggccgacatgtccgggtaatctttgaaatttcatcgtgatggggatatatcattgcaattgttggtcttcaacgaggaattcctagtaagcgcgagtcatcagctcgcgttgactacgtccctgccctttgtacacaccgcccgtcgctcctaccgattgaatggtccggtgaagtgttc

SEQ ID NO: 25608 - DNA, 250 bp, Glycine max
  Clone ID: 701099110H1
ggcttcaacatctacaagggtgaacaaggaataagccaagttttgtcgatctctgcgtacccctttgaggcaaggagctccattgaggaattgcatgagctttgcaaacctttcttctacaaatctcagcctctaacgttcgcaagcctcttcacctttgtcatcactctcatcctattcctgtgagctacacaaatctgtttcaacgcaagagaaacaacaatagaggagccagccggcacatgctgtc

SEQ ID NO: 25609 - DNA, 251 bp, Glycine max
  Clone ID: 701099111H1
cgtgagagcatacctgtcgggacccgaaagatggtgaactatgcctgagcggggcgaagcagaggaaactctggtggaggcccgcagcgatactgacgtgcaaatcgttcgtctgacttgggtataggggcgaaagactaatcgaaccgtctagtagctggttccctccgaagtttccctcaggatagctggagcccgcgggcgagttctatcgggtaaagccaatgattagaggcatcgggggcgcaacg

SEQ ID NO: 25610 - DNA, 122 bp, Glycine max
  Clone ID: 701099114H1
aaacaatgtaatacgtatacaaatataattgatccaatgcatcagttatatttgtatacatattacatttgttttgaatttatgcatgtattgcatcattatcttaaaacaaaaaagagggg

SEQ ID NO: 25611 - DNA, 255 bp, Glycine max
  Clone ID: 701099115H1
tctcgagccgattcggctcagggcgacaatcacaaggtcatgatgagacttatgtgaaacagctttctgattatataataccaaatttggtggaggctttacacaaggagccagaagtagaaatttgtgcaagcatgttggatgcattgaatgaatgcatacaggtctctggatcacatctagatgaaaagcaagttcggagcattgttgatgagattaaacaagtccttacggccagttcatcaagaaaacatg

SEQ ID NO: 25612 - DNA, 255 bp, Glycine max
  Clone ID: 701099116H1
tctcgagcgattcggctcagtgagacttgagttggaaatcatggcgattggtaatgagaatcagccacaacaatctgaaggcaaagtgtggaatttgttcaagcttccctttcgccattcaacttcaactcctcacaatcacaatcaagtttccacctccaattctgtctctccctttcccaaatcgctcctcccctcaccacgtcgtcttaagcttgatccttccaacaagctctacttcccttatgagccggg

SEQ ID NO: 25613 - DNA, 257 bp, Glycine max
  Clone ID: 701099121H1
gtcgcttggcgcagagctttgagtataactatggtgattttattcccatcttgagacccttcttgaagggttacttgaagatttgcaaggaggtgaaggagacgaggttgaagcttttcaaggattacttcgttgacgagaggaagaagcttggaagcaccaagagcaccaacaacaataatgaacttaaatgcgctattgaccacattttggatgcccagagaaaaggcgagatcaacgaagacaacgtcctctac

SEQ ID NO: 25614 - DNA, 255 bp, Glycine max
  Clone ID: 701099123H1
ggaaaatggatggtctattttggagaatctttggttgtttcaccttccaaacaaatctagaactcatggtcatctctttgagcttactggtgccaacaaaagggtgagaattttccccggaagaaagctagactatgaactgagacacaatgggaaacggggaaatcaaatgaatttcctaacagctgttgaattctccatagaagaaccctatggcaaagcagtggcattgcttgacttgagatctagacatgt

SEQ ID NO: 25615 - DNA, 253 bp, Glycine max
  Clone ID: 701099124H1
tggtgatggatgggttgaacaatcttcccaaccatttctttttggcttattgcagaaggttgatgctccttcagcatatgtgtgtgctggtagcaggatatatgatgccaccgaatggtatatctgtcagggcatgagatgtccagcgagtactcataagccaagttttcatgtgaacacaaatttaatgtccaagcataattctggcaaaggaactagttcaggtcaaagaggtgggcgtatccaacaccta

SEQ ID NO: 25616 - DNA, 255 bp, Glycine max
  Clone ID: 701099129H1
cgcgcttccgctgccgccgctaccatgtcgggttaccaccacaactcctcctcgagacaacaacaacacatagaccatgaattggccttaacaccacaacgagtgtgtgtctctccacctctgagcaggtacgagtcacagaagcggcgcgattggaacaccttcgggcaatacctgacaaaccaccgaccacctttgactctctcacgctgcagcggcgcgcacgttctggaattcctccgctacctcgaccag

SEQ ID NO: 25617 - DNA, 253 bp, Glycine max
  Clone ID: 701099130H1
ctttcgcttattttattatcgttttcctttctcccgagagttctcctttcccgcttccttctccggccatctttatcctgatggcgtcgtctctgggaattgcttgcggtggaaacaacgccaaattagggatcccaaagcagcggtgtggttcggttcttcagccgccgtgctccctcgctatggggcgctcgacggcgagggtggggaggatcacggcggcgatggccacggccacggcggtgatgaccac

SEQ ID NO: 25618 - DNA, 259 bp, Glycine max
  Clone ID: 701099131H1
ccacaattcacaaccgaaacagtgtccatctctctcacaaaatgacaacaatatcacattgctcccttctcttcctcttcctcttcctgtccaccctccacatagcttccaccctctcaacccccaccaacttcatcaagtcctcctgcagcaccacccagtacccaggcctctgcatccagtccctctccgtctacgcctccaccatccagcaagacccccacgagctcgtccagacagccctctcgctctccctcaa

SEQ ID NO: 25619 - DNA, 194 bp, Glycine max
  Clone ID: 701099132H1
ccgggtactgctttaccggtgtcggcaaaaaatccaaagatcttttgactaaggactacaactccgatcagaaactcaccatttcctcatacagcatctccggagtggccctcacttcaacatctgtcaagaaaggaggactctccactggggatgtggcagcactgtacaagtataagaacactattattgat

SEQ ID NO: 25620 - DNA, 256 bp, Glycine max
  Clone ID: 701099134H1
gcagatcttcgtcaagaccctcaccggaaagaccatcaaccttgaggtggaaagctctgacaccatcgacaacgtcaaggccacgatccaggacaaggaaggaattcgcccggatcagcaacgtctcatcttcgccggaaagcagctcgaggatggccgtaccctcgccgactacaacatccagaaggagtccaacccttcacctcgtccttcgtctccgtggtcgcatgcagatcttcgtcaagactctcactgg

SEQ ID NO: 25621 - DNA, 251 bp, Glycine max
  Clone ID: 701099136H1
gttttctttgaaacgcacagcttcaatcaccgaccacaccacacatcaacgacatgcttcctctttcccttctcaagactgcccaaggccaccctatgtaggtggaactgaaaaatggggagacatataacgggcatttggttaattgcgacacatggatgaacatccatctgcgagaagtcatttgtacatctaaagacggagatagattttggaggatgcctgaatgctacatacgaggcaatacaatc

SEQ ID NO: 25622 - DNA, 93 bp, Glycine max
  Clone ID: 701099139H1
tggatgaacagagggttgcacagtggaattggcgaacgagacgtgcaagtgcgtcattggtcccattaacagtttaccttgttccacacaaca

SEQ ID NO: 25623 - DNA, 250 bp, Glycine max
  Clone ID: 701099140H1
cttttgtttgttcttcagtactttagtgtgtgatttaattccaagattttgagaatgtctagctgtgggtgtggaagtagctgcaactgtggcagcaactgcggttgcaacaagtactcttttgacttgagctatgttgagaagacaaccacagagactcttgctttgggtgttgggtctgtgaaggcccaattggagggtgctgaaatgggtgttgcagctgagaacggtggctgcaactgtggatcaa

SEQ ID NO: 25624 - DNA, 252 bp, Glycine max
  Clone ID: 701099142H1
gttctgttgatgaggagattctgtctccacatgataacattaggtcagagaatgctaaggggatgattgctgtgaagtttgtcatggacgagaacatttccggctttcaaactggtaaggttcaggcagaagggggatcaacagaagggagtggtcctgagagccctgccagtgccaagggaaatgtgaaggatatggcgaagaatatttttaaacatgcagaaaaatcggctcgtggcttgaggcacgttc

SEQ ID NO: 25625 - DNA, 248 bp, Glycine max
  Clone ID: 701099143H1
gtccgtcaaacccttggccctgatcaggccctctgccgccgccgacgtcgccagagtggtgaagcacgcggcggcgtcttctagcctcacggtggcggcgcgcgggaacggccactccatcaacggccaggccatggcggagcagggcctggtcctcgacatgcgcgccatccaggacccgtttgagattctctggatagaaggttctccctacgtcgacgtttcgggaggggcattatgggaagacg

SEQ ID NO: 25626 - DNA, 249 bp, Glycine max
  Clone ID: 701099145H1
ctcgagcgcgcttttggattaaatttggagaggattcgattgcatctattaccgatttgtttcttggaccctctaaagatgaacaagaaagagcaagtgcaaagaaaaaggcagaagaaactatcatggtaatggaagagcaaggcctaggagacaagaagttctttggaggcaacaatattggaatggtggatatagctcatggatgcctgagtcattggttagaaggcttggaggaaattgtgggga

SEQ ID NO: 25627 - DNA, 250 bp, Glycine max
  Clone ID: 701099146H1
caaaattcaactcaataatcccttccctggttcccatcatggacgactagaagaaaccctactcacccaaatcgactgggaatcgttcctcgacgacatacctgcacttaacgtcgatgattttttgcaggacgacaacgccgttcctgttgttaccgacaatcattcctccccgaacgacgaccccgttttgtccgagatcgagaacatgctcatgacgcaggccgaaaacgacgctgtcgttttgccc

SEQ ID NO: 25628 - DNA, 253 bp, Glycine max
  Clone ID: 701099147H1
cgcagtcgcagtgagtgaaaaggaaaaccctaattgcggtattctcagtgccttcgagagacagaaaaaatggcagataatcttgttctccgtggcaccatgcgcgcccacaccgacgttgtgacggcgattgccactcccatcgacaactccgacatgatcgtcaccgcctcacgcgacaaatccatcatcctctggcatcttaccaaggaggacaagacttacggtgtcccccgccgccgcctcaccggcc

SEQ ID NO: 25629 - DNA, 284 bp, Glycine max
  Clone ID: 701099148H1
catacgtaagcacggtcttaattccgaacgaggacagagtaagggtggtgaaaaacgatgaagccaggtgaaatgtttgctcacataggatccatagttgcttccttgatgtttgtttgggccatgtttaagcaatttttcccttatcaactaagcaaccaaattgagaaacactcccaaagattggtgaccttagtctacccttacatccaaatcacattccatgagttcactggtgagagactcatgagaagtgaggcctattctgccatagagaactacct

SEQ ID NO: 25630 - DNA, 264 bp, Glycine max
  Clone ID: 701099149H1
tgagcatggagggttgtgtgaagccgttgctatgccttgttgggtttgtggtgcttgtgagtactattggtggggtcgagagtgctggtgaatgtgggaaatctacaaccccacataatgaggcttataagcttgcaccatgtgcctcagcagcacaagatgagaatgctagtgtttctcagagttgctgtgctcatgtgaagaaaattgggcagaaccctagttgcctctgtgcagttcttctctctaacacagccaaaatgg

SEQ ID NO: 25631 - DNA, 259 bp, Glycine max
  Clone ID: 701099150H1
gcatatggacactttggcagagatgaccctgacttcacatgggaagtggtgaagccactcaagggggagaaggtacctgcttaactaaaaggggttccaacactcttggcaagggacttttgcactactactggcttcttattatctgattgctagaattttctctatgtttccttccctcttactcaattctgtttttcattttctgtatttatttatgaatttcccccttttttttgtgtacttgtaagagtgcttt

SEQ ID NO: 25632 - DNA, 252 bp, Glycine max
  Clone ID: 701099109H1
gcaaggttcctgagtgggttgaaggaggaaagagttgaagctgcaaaggtctttaaatcaggtggcattggtgatattgtgactgatcaacctgtagacaagcagaagttgattgatgatgttaggaaggctctttatgcagccagaatctgtagttatgcacagggaatgaatttgatccgtgcaaagagtattgaaaagggttgggatttgaagttgggtgaactggcccggatttggaaagggggttgc

SEQ ID NO: 25633 - DNA, 271 bp, Glycine max
  Clone ID: 701099073H1
cgaaaccctcacccgcgcgcctctccttcccgcagcctccattaccggcgcatcctgcgtctccggcgccattgaaaccctaataatctgctaaagcatcaaactcagtcgtcgttgctgtcgaactcgaaccagtgagactcgcacgagcgaacaccagtgctgcaaagaagtgagaagcaacacccactagagaaaaaaaggaaaaaccctaattgtaaaatggaggctgagacagagactatggtggagaagagggagataatcaaca

SEQ ID NO: 25634 - DNA, 267 bp, Glycine max
  Clone ID: 701099075H1
ccggaggatgaaatcctccgagaaaagatattccgacacgtggacgaggcgtgtcgggagtgggggttcttcctcgaggtgaaccatggggttagccatgagttgatgaaaagttctagggaactgtggcgcgagttcttcaaccagccacttgaggtgaaggaggagtatgccaactcccccaccacttatgagggctatggaagtcgcttgggagtgcagaaaggtgccaccttggactggagtgactacttctttctccattac

SEQ ID NO: 25635 - DNA, 265 bp, Glycine max
  Clone ID: 701099077H1
ttttgtgcagtgccatcgtagattttcttgggagcaatgttagatgcttggtggcatgagtaatagtgacgcatggtaatttgaacggtgcagctggatgattaaccggtgctgatagacaccagagtctgtctacagactgccattttaccattggatatttatcggtattattagatagcagcagtgtaatggcttatgcatttatgtggtttcacttactgtatcctgtgtggcagctacgctgttttcatgaacgtcatgt

SEQ ID NO: 25636 - DNA, 111 bp, Glycine max
  Clone ID: 701099078H1
ctttccgattctctttctgagatccaaaagccttactttttgtccctctcaattctccttgcaatctctagaatccgcttcttcaattcccagttttctccacacaacata

SEQ ID NO: 25637 - DNA, 266 bp, Glycine max
  Clone ID: 701099080H1
ggtttatcgagggtttcgttccttcctctctgcaacaccaacggcgaaacctgggcgacgtcgtcgctctccctccggttccgtttccggctcctcctctcgctcctcttccccctccgactctcgttcctcctctcgctcgcgctccctttctcggtcacgttctccctcgcgctccagatcctcttccccctcctcctcctcttcctcccgaagctcccgcagccgcagccctcccccgcagaggcgccgaagtcctgctgacg

SEQ ID NO: 25638 - DNA, 276 bp, Glycine max
  Clone ID: 701099081H1
cagcatctgcattatgagtacccctgtcgttcgacgcatttccgaatgcttcatcaagccacatcgtccaatcgaagagtctaaccaaatatgttatttagcaccttgggatattattctattgtcttatcactatatccagaagggtctactcttcaagaagcctccaacacttgtcgatcaacagaatttcatagaaaatctgttggagaagctcaaacactctctttcgttcaccctctcccatttctatcctttggctggtcgccttgtcac

SEQ ID NO: 25639 - DNA, 271 bp, Glycine max
  Clone ID: 701099082H1
ctcgagccgcaagtacagaagtcataaacgcagccggttcgttatcagatcttgctttggtggtcttgagcaatcttttattgctagtggtagtgaggattctcaggtttacatatggcacagaagctcgggggatttaatagagacattgcctggtcattctggagcagttaactgtgtgagctggaatccagctaacccacacatgttagcctccgccagtgatgaccggacaattcggatatggggcctaaagcgcctgaatgtaaag

SEQ ID NO: 25640 - DNA, 270 bp, Glycine max
  Clone ID: 701099084H1
catcaggcatgcaacaggcttatcaagtccaattggtgctactttccttgagtgtctatttcctttgtatccacctaagtcttgctcccttgaaagtgatgagaatttggaaaaagtaacttcaagtgcacaagaactaagaaagacagagcttgatcttgaagattgtgccggtgactcggtaaggaggccaccaacacttggagagctgattatgatgagccgaagaagaagctgcagaaggaaagcagtacaaatgaacaaatggga

SEQ ID NO: 25641 - DNA, 269 bp, Glycine max
  Clone ID: 701099086H1
gcgggaacaaattgacgagcaaatccctttcattttccctttaaatttatctctattatttacacccataaaattgatttaaatcaaaccaacctataagcaaaactaatatatcactgaattagaaaaaaaaaaatggggaagaagaagagaagtagggtttccgaagacgaggaaatcgaatctgacaccaaccctttcgatcaaaacgaacacactctctaccaggttcttggtgtggagaaaacagcatctcaacaggaaataaa

SEQ ID NO: 25642 - DNA, 266 bp, Glycine max
  Clone ID: 701099087H1
gggtcttcaaaaatgcggatgagttgcaatggatgtcgagttctgagaaaaggttgcagtgaaaattgcagcatcagaccctgtttacaatggatcaaaagcccagaatcccaagccaatgctactgtgtttctcgctaagttttatggtcgtgctggtctcatgaacctcgttaacgcaggccccgaacatcttcgtccagcgatctttcgctcgttgttgtacgaggcatgcggtcggatagtgaacccgatttacgggtctgt

SEQ ID NO: 25643 - DNA, 266 bp, Glycine max
  Clone ID: 701099088H1
cacccacctccaccacttctcctactgacgtcataatctgtttaatatgctccaaatcccaggcatgcagaggtataccccaacacaacaactagactaggcgatagccaattctcagctgaggcgtccatttttctagtgaggatgagccttgctcatttgcttccttagccattggtgtagctctggtctctctaagtcccattagcaatatcatgtcatcgccaatatattttggcgtgatgtcttcacctccattccacaca

SEQ ID NO: 25644 - DNA, 265 bp, Glycine max
  Clone ID: 701099089H1
ctcgcagctcgtgacaccaccgccagtgtgctgacgtggatcgtcaagtaccttggtgaaaaccccagtgtcctagaagctgttactgaggaacaagagtgcatattgaagagcaaggaagaaagtggagaagataagggtctaaattgggaagatgcaaaaaagatgccaataacttcaagggtcattcaggagactctaagagttgcttcaattttgtcttttactttcagagaagcagtagaggatgttgaataccaagggt

SEQ ID NO: 25645 - DNA, 265 bp, Glycine max
  Clone ID: 701099090H1
gaaaatatgagaggtaaacatggaaaaacaatgatcgttgtaatacatagaagcataacatttatgttgctcgccgttgtcagaagtttgctacatttcaagagaactgaagtcatatgatatgattccggatctgacaaaagcagtctggaatgtattggaacttagacttctggttttaatcagtttcttcttgcaagtattcctaatagtttttggcaaccgaagaaaatgcatagccgatgcaaggctacaagtcagtgtc

SEQ ID NO: 25646 - DNA, 255 bp, Glycine max
  unsure at all n locations
  Clone ID: 701099091H1
ccacgatatggtcttgaagtaggacttacaaattatgcagcagcttattgcactggtctcctgttggcccgaagagtcctcaaaacacttgaaatggatgaggagtatgaaggaaatgttgaggctactggagaggattattcagtggaacctgccgagagcaggaggccattccgtgcactccttgatgttggtcttgttaggactacaacaggaaatcgcgtctttggtgcctntaaggcagctctggatggg

SEQ ID NO: 25647 - DNA, 261 bp, Glycine max
  Clone ID: 701099092H1
ttccattcataatgggtgttttcacattcgaggatgaaatcaactcccctgtggctcctgctactctttacaaggccctagttacagatgccgacaacgtcatcccaaaggctcttgattccttcaagagtgttgaaaacgttgagggaaatggtggcccaggaaccatcaagaagatcactttccttgaggatggagaaaccaagtttgtgctgcacaaaatagaaagcattgatgaggcgaacttgggatacagctaca

SEQ ID NO: 25648 - DNA, 202 bp, Glycine max
  Clone ID: 701099094H1
atgagtctcctgattcatgtagtttaatgtttgtgtaaaatatcatttttagacgctagtcacaataatggctaattaatcgtttagtttgagctacaggctcttctacattctatgttgtaatcctagaacataggctatataaattgatatatcattctttttcttgtattgtgatcatcataaattttgatctgttatc

SEQ ID NO: 25649 - DNA, 265 bp, Glycine max
  Clone ID: 701099095H1
ctcgagccgcgaaacagtttccatctctctcacaaaatgacaacactatcacattgctcacttctcttcctcttcctcttcctctccaccctccacatagcttccaccctctcaacccccaccaacttcatcaagtcctcctgcagcactccccagtacccagccctctgcatccagtccctctccgtctacgcctccaccatccagcaagacccccacgagctcgtccagacagccctctccctctccctcaaccacaccgagg

SEQ ID NO: 25650 - DNA, 267 bp, Glycine max
  Clone ID: 701099096H1
ggtacaccggagttcatggccccagagctttatgaggaggaatacaatgaacttgttgacatatattcctttggcatgtgcatcttagaaatggttacctgtgagtacccgtacagtgaatgtaaaaatcctgcacagatatataagacagttacctctggtataaagcctgccgcccttgctaaagtaaatgatcctgaagtgaagcaattcatagagaagtgtctagttccagcatctatgagattgtctgcatctgaacttctg

SEQ ID NO: 25651 - DNA, 271 bp, Glycine max
  Clone ID: 701099101H1
cacggtcctaaaaaatagttcacaatccatatccctcctctcttgttatatatagacacaaacgtaagaccttttgtttcttacttgtaataattcttataacacaacacaacccatggccaccacctctccattcctcctccttccactcctcctgctgctccacctcgccatcgccgctcacggcatcggcatcaactacggcacgctcggcgacaaccttccaccgcccgcggcgtgtgcgaacttcctgaagacgaagacgaccatc

SEQ ID NO: 25652 - DNA, 267 bp, Glycine max
  Clone ID: 701099102H1
cgaaggtatcgcagtcaaagcagcagatcttgatatttctgctatcatgggcatgggttttcccccttacaggggaggcatcatattctgggctgattctcttggatccaagtacatatattcaagattggagaaatggtcagagttgtatggggaattcttcaagccttgtgcctacttggctgcaagagctgccaaaggaattcctctgagtgcctctttggagcagcaggcaaagtctcgcatgtaagaaaaaaacagctcatt

SEQ ID NO: 25653 - DNA, 259 bp, Glycine max
  Clone ID: 701099105H1
ggaagatatgatatgagatatgagatatgagatgggagtctccattctcacccgtttccatttctctctccctctcccacgcgccaccgccactcagaggattttccatttctgccctccgattgcatgccgctcatccatggatcagtcttctggcctgaatctggaagatctgaaatgggaccattccttcgtcagagaattgcccggcgatccccgccgcgactcctttccccgtgaggttctgcatgcttgttac

SEQ ID NO: 25654 - DNA, 257 bp, Glycine max
  Clone ID: 701099106H1
taacaccagaggagaaaaagcttttgtcagatttgaaccctgaaatcaaagaccttaaagagaagcttgttgcttgcacgactgatcgcattgagactgaagcacggagagcagagctggataccaatctaaccactaaccttaggagaaggaaacaagagctggaggctgtaatatcatctgcagatgctgactctttggttgctgatgctgaatcaaagtggcaggaacttagtgatgctaaaatattggttgat

SEQ ID NO: 25655 - DNA, 257 bp, Glycine max
  Clone ID: 701099107H1
gaatcattgtacggactgaggtcgaaatcgcgattttcgtgtttcgcgccgccgaggccgaagccagtgatgacgtcagcgagcaatgaggagggtctaagaacatcaaaatcgagggcgttaaagatttacaacaatctgaagaaggtgaagcaacccatctcaccggggggtaagttaagtaattttcttaactctctgttggcgacaggggggagcgtaaagaaaaccaaaacctacgacgacacgaaagctcc

SEQ ID NO: 25656 - DNA, 270 bp, Glycine max
  Clone ID: 701099071H1
ggaagaactgcaaaacatgttgaagggaagaactttgagttgcaaaaagaagagttccctaaaggcaagcgtaaagctcgaaaacgtaggcgccttgctcttcagggaagagcagtgaaggatgtcaggaggagacagaaagttagctcgctaacggatgaggatctgggtccattctccaattctagtgaagagagcatgttcagtgaagatgaaattcaggctggcagaatttgtcctgctggaagttcatcagatgaggcaggtagt

SEQ ID NO: 25657 - DNA, 276 bp, Glycine max
  Clone ID: 701099037H1
atcccctttccagcatggactgtcaaatccagctacaagaaactctacgaaggtctctcgacagcaggtactgcgattctggacgaagcggagcgcgtggggataaagagggacgaagcgtgccacaatcttgtgttcatgttatcgttcaacgcgcagggtgggttagtgaaccagtttccgattttgatcaagtggctaggactggctggggagggtttacacaagcagctcgcggaggagatcaggaccgttgttaaggacgaaggaggggtg

SEQ ID NO: 25658 - DNA, 274 bp, Glycine max
  Clone ID: 701099038H1
cggctcgagctcgagcgaatcggctcgaggaagattcagttcgggattttcgcgcttcgacctcaactatgcagcgcgtgagtgagggaacatggacggtgccgaattgtccaacataaagaaatggattgtgatgtatcctgtttacataaactccaaaaaaacgatggccgaaggcagacgcattggcctcgccaaagcctgcgaaaaccctacttgcgctgaaatcggtgattgctgcagctatctgaagcttccttttgcaattgagata

SEQ ID NO: 25659 - DNA, 274 bp, Glycine max
  Clone ID: 701099039H1
ccagaaccagatctagggtttattttccttttcttttagaatttgaacaagttttgcgtcttcaaaggaaataggatgggagaattgaaggacactgaggcttacgaggaagagctcatcgactacgaagaagaagaagaaaaagctcccgattccgctaaacccgttactgaatctggcaagaagggttatgttggcatccatagttcgggatttcgagacttcctgttgaaaccagagcttcttcgagccattgtagattcaggatttgagc

SEQ ID NO: 25660 - DNA, 273 bp, Glycine max
  Clone ID: 701099040H1
attttgcgggtatttgtgagtgtgtgagagagagagcgagcagtttcagacacagagagaggggtttgggattggagggattgacgctgcgtctcttcctcttctctttcgatccatccctcattcctaatcctccaatccaaccacctcagcctcacactcacatatacacatatctgaacgcgtatcgtccctcctatggcttcaaagcgcatcctcaaggagctcaaggacttgcagaaagagccaccaacttcttgcagcgctggtcca

SEQ ID NO: 25661 - DNA, 268 bp, Glycine max
  Clone ID: 701099043H1
ctccctttgattgcatatatctgagaatcacccttttattgattcaaactttggaaatctcaatcttcacccttatgattgaacttaacatgaagcatcaaggcaagcttagagtgtttcttccaaatatgataatacttgtaaccatccttctccattcaacaacatggattagtgcacaggaagttgaggatgaaagtgagtttgattacataaaagggagtgagaagggtccctcacactggggggaactgaagaaggaatggga

SEQ ID NO: 25662 - DNA, 268 bp, Glycine max
  Clone ID: 701099046H1
ctgctcttgagaacaagttattgttggcagggtttacagaaacacaagtcttacaattaactgggatcaaagctaaaaagccttcatggaaaattggttcatcttttgcgctaaagaagctgataaagagttcacctaaaatgcaaattgattttgattcggatctaattgatgaggatagtctcttgactgaagaagatttaaagaaaccccagctgccacctggtgattgtgaaattgggagcacaagacaagcctgcaaaaattg

SEQ ID NO: 25663 - DNA, 270 bp, Glycine max
  Clone ID: 701099048H1
tgagataccagttcatgctcagaggcttcaatatttggcctttgcaagttggttaggaattgttctttgcctaggttttaatgtagttgctgtgactgtctgttggattagaggcggcggtgttaaaatttttttccttgcggttatatatgcgctacttggtgttcccctttcatatgttctttggtacagacccctctatcgtgctatgaggacggacagtgcactgaagtttggttggtttttcatgctctacttgcttcatattgg

SEQ ID NO: 25664 - DNA, 202 bp, Glycine max
  unsure at all n locations
  Clone ID: 701099049H1
cggaagagtgggtgttggtggttgtcctcctccctcctcatgggtatggcaaccctctcctcctctcttcctcttttccatcgctaccctaaccctaaccctaatccttcgctctttcgcccctcccttttcccctctccttctccttctctcgcactaaaccccgtcgtgncccctttctcgttctcgctctctctcccca

SEQ ID NO: 25665 - DNA, 275 bp, Glycine max
  Clone ID: 701099050H1
gtcagcttagaattattattagtgtgacattattaattaattcttggctagacaacaacatggcctccgccgcagccgcagacggactcttccggccgatctacgaggcctgcatctccgcctacgacaacgacgtggagcgccgcccctaccacaagaactgcggctccgctctgcacagcaagtcgaggaggaacagcagcagagcgtgcaggcacaagttgccaaaatgcaacaacgtgtcctaccctatgaggagggcttggagtgaaggg

SEQ ID NO: 25666 - DNA, 274 bp, Glycine max
  Clone ID: 701099051H1
ggcagtggcagcgacgatccggctcacggtgccggccggacgagctcggccggcgccaccggttggaccggcgctgggtcagtaccggctgaacctgatggcgttctgcaaggacttcaacgcccgcacccagaactacaaggcggagacacccatggccgttacgataacggcgtacaaggacaacaccttcgagttcaccgttaagtcgccgccggtgtcgtggtacctgaagaaagccgccggcgtggaatccggtagcagccggcccggt

SEQ ID NO: 25667 - DNA, 224 bp, Glycine max
  Clone ID: 701099052H1
cagcatccctggatcttgctggactagttgcatctctgaagttggttgggggtaacttagctgatcacagattctttctccttggtgctccagaggctggcactggcatagcagaactcatagcacttgaaacatcaaaacagacaaatgctccactggaggaagtgcgcaagaatatttggctggtggactcaaagggattgattgtcagttctcgcaaagat

SEQ ID NO: 25668 - DNA, 154 bp, Glycine max
  Clone ID: 701099053H1
aaaattaatcatcttacttatttattctccgaaaatggttgatttacattggaaatcaaagatgccaagttccgacatgccttccaaaactctaaaactctctctctccgacaacaagtccttagcctctttgcaactacccttccacacaaca

SEQ ID NO: 25669 - DNA, 272 bp, Glycine max
  Clone ID: 701099055H1
gaaatggctaagaacagaccaattgatactaaggggaagaaaggatttaaagtacttgtgctcaatgacgttgacaaactctctagagaagcccaacattctctccgcagaaccatggagaaatacagtgcttattgcagattaattctatgttgcaatagttcttctagagttacagaagcaatccgctctcgatgtctcaatgtgcgaataaatgcaccaagtgaagaacagattgttgaagttttagaattcattggtaagaaggaagg

SEQ ID NO: 25670 - DNA, 273 bp, Glycine max
  Clone ID: 701099056H1
ctctgacattggcaagagagctcgcgatcttctgttcaaggattatcagaatgaccacaagttcaccatcaccacttacacttccaccggagtggaaatcacttcaactggagtcaggaaaggtgagacatatttggccgatgtcagcactaaggtgaagaacaagaacatcacaactgatgtcaaagtggacactaactcaaatctgcgtacaatcattactgtggatgaacctgcccctggactcaagacaatttttagctttaattttcc

SEQ ID NO: 25671 - DNA, 270 bp, Glycine max
  Clone ID: 701099057H1
acgagatccaccagatgtacgagacctccttccagaccctctcggagcctctcttcaaagacaccccctggccctccgtggacgccgtcgctcactacgtcgacaacgaccacgtcttctgcctcctctaccgcgagatgtggttccgccacctctacgcccgcctcactcccacgctccggcagcgcatcgactcgtgggataactactgcagcctcttccaggtcgtcctccacggcgtcgtcaacatgcagctccccaaccagtggc

SEQ ID NO: 25672 - DNA, 269 bp, Glycine max
  Clone ID: 701099058H1
ttgatacaaaggctttcaaagacaccgttgacttgtttgttgagaggtacagagatcaaaacatcaatgttgtcgcaggagttgaagcaaggggctttatatttggtccacccattgcattagctattggagcaaaatttgtccccatgaggaaacccaataaattgcctggggaggttatctcagaagagtattctttggagtatggaacagacaaaatggagatgcatgtaggggctgtacaacctggagaacgagccttaatcata

SEQ ID NO: 25673 - DNA, 267 bp, Glycine max
  Clone ID: 701099059H1
ggcagaagtcctaggagtgtaaaacagagacgcaaaatgaagacgatcttgtcgtctgagaccatgaatattcccgacggcgtgagcatcaaggttcacgctaaggttttcgaggttgagggccctcgtggaaaactcgtgcgagacttccaccatctgaacttggacttccaacttattaccgacgatggcggtaaaaggaagctcaagattgattcttggtttggttctcgtaaaacctccgccgccatccgcaccgccctcagc

SEQ ID NO: 25674 - DNA, 268 bp, Glycine max
  Clone ID: 701099063H1
cggagcatggcagatctcaagtccacattcttgaacgtctattctgttctcaaatctgaactcctccacgaccctgcttttgagttctccgatgatgctcgtaattgggtcgaccggatgctggactacaatgtgccgggaggaaagttgaaccggggactgtcagtaattgatagctacagattgttaaaagaaggacaggcattaaatgatgacgaaattcttcatgccagtgctcttggttggtgtattgaatggcttcaggcat

SEQ ID NO: 25675 - DNA, 277 bp, Glycine max
  Clone ID: 701099064H1
cagccctcttctccgccacttctgaatctattgaatcaacactcatgtcggacgaagagcaccattccgagtccaaggccgacgccggagcctccaaaacctaccctcagcaagccggtaccatccgcaagaacggctacatcgtcatcaaaggccgcccctgcaaggttgtggaagtttcgacttccaaaactggaaagcacggtcacgctaagtgtcactttgttggaattgatattttcactgccaagaaacttgaggatattgtgccctcttc

SEQ ID NO: 25676 - DNA, 199 bp, Glycine max
  Clone ID: 701099065H1
actcttgatcaccataaccatgtcaatcgcaacaacatcccctcacaccgccctcttcccaaaccgcaccaaccctttcactctctcctcctctcaaacccacatccatcaaatgctccatccaactccatacccaagccccgcacctcacccactcccaagatcgcgtcttcaacttcgccgctggtcccgcaacctc

SEQ ID NO: 25677 - DNA, 274 bp, Glycine max
  Clone ID: 701099066H1
gctggaaacagcgaaagtgaaataccactacttttaacgttattttacttattccgtgaatcggaagccgggcactgcccctctttttggacccaaggtcggcttcggccggtcgatccgggcggaagacattgtcaggtggggagtttggctggggcggcacatctgttaaaagataacgcaggtgtcctaagatgagctcaacgagaacagaaatctcgtgtggaacaaaagggtaaaagctcgtttgattctgatttccagtacgaatacg

SEQ ID NO: 25678 - DNA, 274 bp, Glycine max
  Clone ID: 701099067H1
gaacaaacaaactagtcaatcggagggatatgggcttattgcgtttactagtcgtgctggtgctgagagagtccttcaaacatacaatggcaccattatgccaaatggcgggcagaacttcagattgaactgggcaactcttagtgcaggtgagaggcgtcacgatgatagcccagatcacaccatatttgttggagacctggctgccgatgttacggattatcttcttcaagagacatttcgggcacgatatccctcaattaagggggccaaa

SEQ ID NO: 25679 - DNA, 270 bp, Glycine max
  Clone ID: 701099068H1
tgacaaggagattctgcaaattgtgaaggagaatttcgacttcagacctggaatgatcaccattaacttggaccttaagaggggtggtcataggttcctcaagacagctgcttatggacactttggaagggatgatgcagacttcacctgggaagttgtgaagccactcaagtcagagaagcctcaagcttaagagtgttgttaagttaatcactcccttcagtggatgtcttgctgggtgtggatgaataatttgcgtgtttcatgact

SEQ ID NO: 25680 - DNA, 269 bp, Glycine max
  Clone ID: 701099070H1
gtgaagaagctgaaaattcttgctaagcgctgcaaactacagcatctcctgcaaatgctttatagacaacgtccaaagtggggcacacctttccccagctttaatcgtactccatctcttggttcagccggaagttgtttttcggatgctatattggaagctaaatcaaataaacttgttgggtggacatgcaacatttgttctgacacagtgccccatatgcatgttcacaaagttatattgcagtctggttgtgattatttacaagg

SEQ ID NO: 25681 - DNA, 272 bp, Glycine max
  Clone ID: 701099035H1
ctcgagcgattcggctgagtgatttcttcgtttggaggacaccctcaaaggtgttctactgtgaaagttagccacttttgaagatgaattgttataatcttcagaagaatgccttctcagcctgtgaagagatgagaggctctcttcccattgctgatcagaatggacctgtcttttgtcctaagccacgccgagctggggttttaatgaacttgcctattcgaccagtaaaatggcatttaggtcaacaagctgaggggtctgattcaaaa

SEQ ID NO: 25682 - DNA, 71 bp, Glycine max
  Clone ID: 701098994H1
gaggggtgtgaatgtcaatgctgttaggcccatcatgaataatcctcccagtgcttgaagatcgtggcagc

SEQ ID NO: 25683 - DNA, 250 bp, Glycine max
  Clone ID: 701099001H1
atattattctcctcattccttcatttttaaacctagctccatctccctccactcaccataacatgccatcagaagcaaatgctgccaacaccaacttctgtgtaaatgttagcaacaatggctacattagtgctaatgacccttgaactggggtgcggcggcggaagctatggctgggagccacctcgacgaggtcaagcgcatgctagaagagtaccggagccccgtcggtaagctcggtggagagacc

SEQ ID NO: 25684 - DNA, 285 bp, Glycine max
  Clone ID: 701099002H1
caaaccctggaattaagcacgttatttcattagggttggttttgttgaacagaaaaaaagagaaaaaaaaattatgggaagcgatggcgtgaggaaaccaagattcctatgccttcatgggttccgaacaagcggagaaatattgaaaacacagttacataagtggcctcaatcggttctagacaacctcgatctagtatttgtggatgctccttttccttgccttggcaaatccgatgtagaaggcatttttgatcccccttactacgagtggtttcagttcaa

SEQ ID NO: 25685 - DNA, 283 bp, Glycine max
  Clone ID: 701099004H1
ctcatacttgaagcagaaaaccaggcctaaaccttctcctcctatctccttctctgcaaacccaatcagagtgacaacaacctagtgcggttccaatcaaacaaagatggttaatgcaaaaaccgaggtaccccataagagtgtccttagtatcaagcaagatgacaagttcttctgcaggcttctttcaaaggaaagctccatggccaacccttctttcagaatagcccttgctgtgccatttgtgtgggaatctgagccaggcaccccaaaacacaggttc

SEQ ID NO: 25686 - DNA, 278 bp, Glycine max
  Clone ID: 701099005H1
cgctagcaagggtgttgtagtatagttagagatatcactactacaccaccctgcatagtttgttcagctataatactacttgagcttctttacctacttttcaaacctacattgcacacaaaatggcaacctcttggtcatgttatctacttgcattgcttctttttatgtcaactattgtatcagagagtagagtggcaaggaaggacttgggcctggaccttggtgggttgggggttggacttggactgggtttgggcctggggataggaggtggc

SEQ ID NO: 25687 - DNA, 277 bp, Glycine max
  Clone ID: 701099006H1
ccagcttaaggctaattgcagcgttagttattttcagaatcccgcaagagggagcatcagattcaagcatttccttgcatcagaggtcactttccgaaagacgtattgcccattatattcttcactcccaacggacccccaagtaagtaggcgactaatttgttcccttgccacagaggatttaccaaaggaagttgaaaaatctaacatggagacaccaagggccatattcttacaggattacaaaatgcctgattactactttgacactgtggat

SEQ ID NO: 25688 - DNA, 274 bp, Glycine max
  Clone ID: 701099007H1
agaagtgccctccccagaaaggctatgtgcgtgcttgccttaaaagtggagggtatgttatatcaccagtgaacaaaggaaagcaatcagttgtaaagcatatgcttgctattgattggaaatgctggagattatatcttaaatcttcatcagcacattccataaccattcaaatgcttgggagagttgctgcattacgggaattatttaaagctaaactaggaaattgttcttcatctgattattcatctggagagttgacgagaaacagaga

SEQ ID NO: 25689 - DNA, 274 bp, Glycine max
  Clone ID: 701099008H1
ctataattccttctatcgaccaagttattgcgaaaatcccggttctgaaaaggtcgaatagcaccagagttatgtgcttggacttggagttacacctgtagagaatgaatgactgaactaccaagtcacccaagctcctttttctttgttcttattaacttttctacattttttacctgtttctggacacatgtattctttcattttttgtgtgaaaattttattgacttttcccttatagatgattgattctttattctggacacatgtatta

SEQ ID NO: 25690 - DNA, 279 bp, Glycine max
  Clone ID: 701099009H1
cgaaaagtatcatcggcccctgttgctattgatgccccgggaggctttctgttcgagtggtggtcggttttctgggatatatttattgcaaggacaaatgaaaagcactcagaggttgctgcatcgtatattgagacacaattaataaaggcaagcgagcaacaacagcagcagaaccagcagcagccacagccccagcaatcacagcatcagcaacaacacatgcagatgcaacagctcctgttgcagagagcacagcaacaacagcagcagcagcag

SEQ ID NO: 25691 - DNA, 271 bp, Glycine max
  Clone ID: 701099012H1
cgctatggcaccaacattcaaggccttcgctcttttcctcatcctcgctctcttctccgccgcctccgctcaagaattatcccccgcctcgtctccggcaccgtcgcctgaagcaggagccgcagactccgtgccttgctccgccatcatgatcggtgcctcgctcgttttgtctctcatggcggtcttcaagttctaggatttcttattctgcatttcatgaatgaattaatattccaaaataccatatatactaaacttgagactttcc

SEQ ID NO: 25692 - DNA, 270 bp, Glycine max
  Clone ID: 701099013H1
ctcaacttctccacctccatcccgcgccccctcctcgaagacctcgccgccggaaccctaaattcggattcgattcagcgagtctcgaaggttcacgatcaatatctggaatttgtaaccctagaggataaccttttttcactggcccacaagccttgttatgttcaactcaacgatccttccgctggggacaaggaaattgaggagcttgttgagaagatcgttggtgggttgtcttgtgtgttggccactcttgcggttgtgccggtg

SEQ ID NO: 25693 - DNA, 274 bp, Glycine max
  Clone ID: 701099014H1
cgtttggcaataactattcttgaagataatggaaagggagttgatactactacacgtgaccaggaaacaatggactttgaagaacgaaaaatctcctttgaagcaaatgagactactgataatagttccttctcacctgttccacctgaaaaatctgagaagttggcagataactatgagcctatagacatcgacgggcaaaaagagacaggagtttgggttcatcacccaggaagtgaagtttcccaaaggtgggagcctaggaaagggaaga

SEQ ID NO: 25694 - DNA, 272 bp, Glycine max
  Clone ID: 701099015H1
cagccaccagtcggaggcggcgaatgcggtggaaagtgagagcattttgtctgctgagacttcgatcctcttccgagatgaaccggaatccaacccgaagcgcttggaccggaccgatgatgttggtttagagcttacgctagggttcgagccggtatcaggtgcgcacacgtggttccggtgaagaagagaaggattgatttgaaggattttagtggctcgtcgtgcaagatggagctggggcttgaatgctcggcttgaggactagtggc

SEQ ID NO: 25695 - DNA, 150 bp, Glycine max
  Clone ID: 701099016H1
catttctcagaaaccctctcgaatgactgagtcaatgcccgccgtggaaccgtcgccggagcctccggcgtccgatatcgtgttcgatgacttctccaccgacttcagcgccttccccatcccctccatggactcgctcttcaacactac

SEQ ID NO: 25696 - DNA, 207 bp, Glycine max
  Clone ID: 701099017H1
caaagtgatgataggttcccgctgcatcactttgagtgggcttggggaaactgaaggaaaatctgacattttggaatttgaaaatgttggattgaatggatgtgttcgagccagtggcctggatcttggtggtttgagtgaatgttttgttaccctccgagcttggagattagatggacgctgtactgaactttctgttaaagctca

SEQ ID NO: 25697 - DNA, 280 bp, Glycine max
  Clone ID: 701099018H1
ctctaaccactttgcttcagctatggagtttcgttgccttccattggttttctctctcaatctgatcctgatgacagctcatgctgccatacctccagaagtttactgggaaaggatgcttccaaataccccaatgcccaaagcaatcatagactttctaaaccttgatcaacttcctctttggtatggtgctaaggaaacccaatctacagatcaaatattcctgtatgatgctaagaaaacccaatcaacagatcaagttcctcctatcttttatggt

SEQ ID NO: 25698 - DNA, 275 bp, Glycine max
  Clone ID: 701099020H1
aagaacgatagagaaaagggtaacgaggttgaccagagttacatacagcagcaccactcgttgtcaatgccaatgatgttttcgggttttaacagagagaaggagatgtcagccatgatcactgctttgacacgtgtggtttgtggagattattctcttgttcatcacaatattgataatactaatagtgcaattgttggtggtggtggtggtgatgatgtttcaaatatggcttctggttctatgccaccttcgtctacttctttatctcatgg

SEQ ID NO: 25699 - DNA, 275 bp, Glycine max
  unsure at all n locations
  Clone ID: 701099022H1
catggctttctttattctctccttcctcttccttcttcttgtttcatctgcttcntgttgtgatcgctgcttgtatcaatccaaggcttcctatttctccaaagcttctgctctttcatctggggcatgtgggtatggctctttggcactagacataagtggtggacaccttgcagctggtgtggattctctcttcaaaaatggagcaggttgtggtgcctgctttcagataagatgcaagaacccaactctatgtagcaaagaaggtaccaaag

SEQ ID NO: 25700 - DNA, 272 bp, Glycine max
  Clone ID: 701099023H1
acaatatattgggtgaagaagaggggggtcttggttttcaattagctcatcaattgatcaaaagggcattgaccatccctggggcaactgttcattggtatgataagccagagatgagaaagcaacgaaagatgggccatataaccattgttgggccttcccttagcaatattgaaagcaatcttgctgtattggtggaagggaaagaattagatggcaagactgcagttgcaccacatgtggggatcataatgggttctgattcagatcta

SEQ ID NO: 25701 - DNA, 270 bp, Glycine max
  Clone ID: 701099025H1
cttgttggtagaagaaattgggcgtgtgggagttgttgaatcgggaagcaaaaaaaatgagaatccatcacatagcatgcctccaagacaattattcctatctgatcgtagacgagagcacgaaggaagccgcggcggtggacccggtcgaaccggagaaggttcttgaagttgccagctcgcacggcctcactctcaaattcgtcctcaccacccaccatcactgggatcatgctggtggaaacgacaagataaagcagctggtgccag

SEQ ID NO: 25702 - DNA, 269 bp, Glycine max
  Clone ID: 701099028H1
aacccttcttctcttctcttggtttcgttctgtgcatctgccaaattaggattaggattagggctaccaataccaataccaataccaattctattctatggcttgctcaagcgcccaaatacacggtctcggaaccccttcctcccgaaccctatttttaggtcagaggctaaataccaaggccgcctttatcaagctcaagtccacacctagaagactccgccctctcagagtggttaatgagaaagtcgtcggtatcgatttgggaa

SEQ ID NO: 25703 - DNA, 260 bp, Glycine max
  Clone ID: 701099032H1
ctcgagccgaatcggctcgagtcgagcgtttacatacagttattttgctgcgattcgtatactgattaaattaatccatgatctgtttaagttcttacctgtatacttgaaatgcttattgagaacctacagtaaacagaagcccagagtagtatcttcgatttggccatcctattttgaatgttgcattgttttttaatgtatttcaacttccatcttcaattcactaatcatatatgttatctatttgaggttgactc

SEQ ID NO: 25704 - DNA, 160 bp, Glycine max
  Clone ID: 701099033H1
gaatcaaagaaaggggtggtggctgcttcgaaagcttaataatttgtttatttccagaacatcatagttttcgcagcagcaaactaacaaattactcatatcatataataagatggcccgttctctctcggaagccaaacgtattggggtccttgttgct

SEQ ID NO: 25705 - DNA, 263 bp, Glycine max
  Clone ID: 701098993H1
cggaggagaatgaaactagtttggtccccagagacagcatccaaagcatacatcgaaacagttcaatcttctcggattttccgggaatcgggggtggcggactagtgtcggcaatggcggcggggtggaacgcgcagtgattgtggaaacgtggtcggaggggggagtgatggcgacgagcgtggggttggccgtggcgaggacgcacacgggagggaggcacgtgtgcgtggtgccggacgagaggtcgagatcgaagtacg

SEQ ID NO: 25706 - DNA, 273 bp, Glycine max
  Clone ID: 701098956H1
ataatagcacgcactcttttcattctttctctgttctcatttcatcttctacacgcgtttctaatcattattagactcgatctcaacgatgaaggcaacactgctttgtccttgttcttctgctcctctgattctcgacacgcatagcaaccgaacctcggcaacgagacacgcttccaccgttgtttgttgttcgtcgaggaatcaaccctacatcccgaagctcgagccttttagccgaaccaaatttgaaagggccgttaaggaccctcc

SEQ ID NO: 25707 - DNA, 270 bp, Glycine max
  Clone ID: 701098957H1
catgagtctgctgataagacaaagaagcaagttatcaaagcagtagagaaggttttggcaggatctataaggagagaaatggcccttgaagagttctgtgccaagcagacctctgagataatgcagcttaatcgcctggtgcaacagtacaagcatgagagggaatgcaatgccataattgcacagacaagggaagataaaattcttcgccttgagagccttatggatggtgttttacccactgaagagttcatggaggaagagctagtg

SEQ ID NO: 25708 - DNA, 206 bp, Glycine max
  Clone ID: 701098960H1
cttacatgagaatgctcatgaccaaggtggaaggcctcgacgagtttggcacctatacacctggctctccattaacagggtatggagtgtccaaagtcctagaatctggacacccagattacaagaaaggtgatttagtgtggggatctacaaaatgggaagaattcagcttggtgtccccaactcaaatacttttcaaaattgag

SEQ ID NO: 25709 - DNA, 273 bp, Glycine max
  Clone ID: 701098962H1
gttggctcttttgtcttatcgttctccatggctcagaaaaccgagaaagaagaaaccgacttcaaagttccggaaacgattacgctttgcgtcaacaactgcggcgtcaccggaaaccctgccacgaataacatgtgccagaagtgcttcactgcctctaccgccaccacttccggcgccggaggtgccggaatagcttctccggcgaccagatccggcgtctccgcgcgtcctcagaagacatcttttcctgaagagccctcgccggtgggg

SEQ ID NO: 25710 - DNA, 251 bp, Glycine max
  Clone ID: 701098964H1
ggaagcccatttgtgtgcagggttcatattgcactcaagttgaagggagttcaatacaaatatgtcgcagaaaatttgaggaacaagagtgaactgcttctcaaatccaacccagttcacaagaacgttccagtgtttattcacaatgagaagcccatagcagagtctcttgtgattgttgaatacattgatgagacatggaagaacaaccccatcttgccttctgatccttaccaaagagccttggctcg

SEQ ID NO: 25711 - DNA, 220 bp, Glycine max
  Clone ID: 701098965H1
ccccctcactcggaatccctccgattccactcgccttccttctctccgccaaaccctaatttccccttcgctcttccccatcaccacgacgcacccatttccgccactccgacaatgtcgctccagggcagcgccacgcacaacggcagcgtggcggcggcgtcgacggcgagcctgaggctgcggctgcagcctaacaacgagcacacagccgcatggc

SEQ ID NO: 25712 - DNA, 275 bp, Glycine max
  Clone ID: 701098966H1
ttctctctccaccatgcaccaagccatttcccacagaagcttcatccccataggagcacgtggcatgccacacgcaggaggaatcaaagaatccaatggcacctatccatccaaagctgccacaatggtatcggagaacgcggtggtaatcattggaaaacggggatgctgcatgtgccacgtggtaaaaaggttgttacaaggtctgggagtgaaccctcccgtgtacgaggtggacgaggaccacgaagccgccgttgctctccacctgtccc

SEQ ID NO: 25713 - DNA, 274 bp, Glycine max
  Clone ID: 701098967H1
aagattttggcactatcgacatacttgagcactcgcttgctaatggaacagaggtcagcaaaccattgtctgagacatctcggaaaggatatcttgctgccctgtctgcatcaagttactcttatatttctttactcagacactttcttccaatcataaacccagatggatctgcaatttctcttacatacattgcttcagaaaggatcattcctggatatggtggtggtatgagttctgcaaaagctgctttagaaagtgatacaagagtgct

SEQ ID NO: 25714 - DNA, 263 bp, Glycine max
  Clone ID: 701098968H1
tgacttgatcctgcgaagtgattctgtgtattatttccatgacatgatcgttcagatgcgtaagtggtgagttgcagagggaaagacgctttttggttttggatatgattttcgccacagcaacaggttgcaggaaacaatggatcggttggctgcaaagttagaatcaatttataatgctgcagtctggaagacaataaacattataactcattctatgggcggtcttttggtgaaatgtttcctgtgcctgcaaagcgata

SEQ ID NO: 25715 - DNA, 265 bp, Glycine max
  Clone ID: 701098970H1
ctttgttggggtaggaacatttaatgatactttcttcgcccgaacttttggagggatgtttgagtctagtccctttggtggtcctactggatttcctttcccccctggtatgaatccatatcgggttccttgagcatccagccccgggtttggatccatctggcttccttgtgcgtcaagctccagagcctagtagacaaaggaggggaccagtcattcaggaattgaactctgatgaagaaaatgaggaagcaacggaggagag

SEQ ID NO: 25716 - DNA, 269 bp, Glycine max
  Clone ID: 701098973H1
aattaattgcacatttctcactcagtagaagtttggaaaatgattgacatacttctgaatctccagatgttagctcctttcttcctcttcttaatacttccagtgtttttcttcttctgtttcacctcctcaggtcctacaaaaggaaccatccctattccaaaaccataccctataattggtcactacttcgccctcaaaagcgtcggcaaccgccgtatccagtggctatccgatattgtcaaaatctcaccggcctgcacgttcac

SEQ ID NO: 25717 - DNA, 262 bp, Glycine max
  Clone ID: 701098976H1
aaaaggaggggctgaaagagaagatcgaggagaaaatagagggtgatcatcatcatcacaaggatgacgacacaagtgtccctgttgagaaagttgaggttgttgaaacagcacatgctgaggaaaagaaggggttcctcgacaagattaaggagaagctaccagggcacaagaagaccgggggggccagagctaatactcatcctcaacaacaacttgttgaatcattggagcatggtgaaggtgctcatcatgaaggaga

SEQ ID NO: 25718 - DNA, 257 bp, Glycine max
  Clone ID: 701098978H1
cgcatctctcagcattcacaaacaccacttgttccccttgccttgacaaactctcagggaagcaacgattccaagagcacacagactaaaggagattcacctaaagtacctcaggttttggtgagccagctggctacttctttgaccacggaaacctaattttcgagcagcacttgttgctgcactctcaggacgattgttgcaccatcattcactggtataaaaagtgaagtgttgctcatttagtgtcaattgtt

SEQ ID NO: 25719 - DNA, 246 bp, Glycine max
  Clone ID: 701098979H1
ttctaagagaacactaagtcagggttcagttgatatatatgctgctcagtgcaaaaattgcttgaaatggagagagattgatacacaggaagagtttgaagagattagaagtaaagttgctgaggaaccttttctttgcagcagaaaggctaatagttcctgtgatgaacctggtgatattaaatatgattcctctcggacatgggtgattgacaagcctaacctcccaaagactccacaaggttt

SEQ ID NO: 25720 - DNA, 269 bp, Glycine max
  Clone ID: 701098980H1
cattttctagcttccaaaccctaacactcctcttcctcttcgatcatcacctctccacaatgccgccgaagttcgacccctcccagatagtcgacgtcttcgtccgcgttaccggcggcgaagtcggcgcggcgagttccctggccccgaagatcggtcccctcggtctctcccccaagaagatcggagaagacatcgccaaagaaaccgccaaggactggaagggcctccgcgtcaccgtcaagctcaccgttcagaatcgtcaggcg

SEQ ID NO: 25721 - DNA, 268 bp, Glycine max
  Clone ID: 701098981H1
ctctcgggttggaaaaaagtgagcaacggtttctgtgggtggtgaagagcccaaacgaagaaatagccaacgcgacgtacttcagcgccgagagccaagcggatcccttgcagttcttaccggaagggttcgtggagagaacaaaaggaagagggtttttggttcagtcttgggctccgcagcctcaggtattgggccatccatccacgggtgggttcttgacccatgcggctggaactctattctggagagcgtggtgaacggtgtg

SEQ ID NO: 25722 - DNA, 274 bp, Glycine max
  Clone ID: 701098983H1
gaagctttagagaagtggctccagtaccttagagaagaattacctactgtggccttcaagtgcagcacacaacaacaaagatcaaacttaagtgcattgtactggtgctgatactctcatcaaattgttgaaaaattactcaagaagtcatgagctcaagaagtcgatcactgtgggtttgattggcttgcccaatgttggtaagagtagtcttattaatagcttaaagaggtcccatgttgtcaatgttggttctactcctgggttaacaaga

SEQ ID NO: 25723 - DNA, 268 bp, Glycine max
  Clone ID: 701098984H1
gtaattgataacaagctagctattagttcgattttgtagtaagtgaggtgccaatatggtgaagatagctcttggtactttggatgactcttttagcgctgcctctcttaaggcttatttcgcagagttccacgcaactctgatccacgtgttcgctggtgttggatcagccatcgcttacaacgagcttacaaaagatgcagccttggatccaacggggctagtggcagtagctgtggcaacatgcatttgcactgtttgtaggtgt

SEQ ID NO: 25724 - DNA, 259 bp, Glycine max
  Clone ID: 701098985H1
aatgatgaaatttgatgggtgtgtgaatgacacttttcccctgtgaggattggggacattggggtggagtaaagttgttaactttctcagagaccatgcaggggcattgagcttgtcttcttgtttcttctcttctcacttggttttgtcttgtggcaggtttgaaggatgatgatctgtatagagagctgtggacgctatgtgcagggccattggtggatgttcctcgtaatggggacagagttttctaattccctca

SEQ ID NO: 25725 - DNA, 269 bp, Glycine max
  Clone ID: 701098987H1
ctgcactgcatatagcaacccggaaaggtcgtctacaggttgttcagaagttactagattgcagagaaatagacacagatgttattaacaaatctggagaaactgctttggatactgctgagaaaaatggtcgcctggaaattgccaactttctgcaacatcgtggagctcaaagtgccaagtccatcaagtcaccgactacaaacacggcccttgagctcaaacgaacagtgagtgacataaaaagtggggttcataaccactggaac

SEQ ID NO: 25726 - DNA, 254 bp, Glycine max
  Clone ID: 701098988H1
actcgagccgaatcggctcgagttaagcaacacacacttcaatttatcagcatggcctccgttcagtgccacaaaacctgcaaagtgagctgccaacaggaaaaccagcacgcctcgtttgggcagaaagtttctgacttgttcaaagggcatcaacataatgaccacagctccaattatgccacccaaaccaaagtgctttaccagtcagggtcagggttaggcccttcaccaccaaactccaacacaatggg

SEQ ID NO: 25727 - DNA, 267 bp, Glycine max
  Clone ID: 701098989H1
cttcgcaacacaacaaaaaaagacaacccagagagcgcgtcttaataaacgctcttctctgaaaacccccatttcttttcttctttcttcttctctttcgcttcttcgatcttcgatcttcgtcgctgaaaatgagagagtgcatttcaatccacatcggccaggccgggattcaggttggaaacgcctgctgggagctttactgcctcgaacacggcattcagcctgatgggcagatgccaagtgacaagaccgttggtggaggtg

SEQ ID NO: 25728 - DNA, 257 bp, Glycine max
  Clone ID: 701098990H1
aattgatggatgctttagtttcgtgtagttattgagttgtatgctagaaatttcatatccgcaggggcagagagtagaaggaagaagagagaaagagggaagctgctgctgaaacgtaatcgatcttatatctacactctaccatggacactgatgatgatttcacattttgtcaggtcagtgcacctgttgatcttgaaacaaacaagcttgcttcagatatagctgatatttccattgaagaagatcttcaaatg

SEQ ID NO: 25729 - DNA, 206 bp, Glycine max
  Clone ID: 701098992H1
cttttaagtgaagacttagaagccaagatagcagattttggcatctccagggagtttaggacagataaccaagatcaacaatctcaagtgattcacagtgatgctacaaatgaaaaatcaccagtaatgggcacaacagggtaccttgacccagagtactacaagttagggacactgaatgagaaaagtgacatctacagttttgg

SEQ ID NO: 25730 - DNA, 269 bp, Glycine max
  Clone ID: 701098954H1
attgcaaccaatggagagatttgtgtcaacacacttaaaaaggattggaaccctaaccttgggttgcgtcatgttctcattgttgttaggtgtctactaattgagccatttccagaatcagctctaaatgaacaggctgggaaactgctgcttgaaaattatgaggagtatgccagacatgccagactttacacaggaatccatgcaaaaccaaagtccaaattcaaaactggagctatatctgaatctacaactgctctgaatgttga

SEQ ID NO: 25731 - DNA, 280 bp, Glycine max
  Clone ID: 701098918H1
acagatgtttcttcgtgacttggggccaattattcatgaaacagattcacatgcatatacaaatgcccttgtcagcagcaatattgaatgtcaaagttaccaattgctgccaaatccagaggatgccaatcaaactgttggtgaattctggatgcatggtgaaagtaatcagctatcatccccaggtgttgtatatgaatctgttggctttcctacggaaggcaataacaatcaaagtagcactgtggaagatgttgctacaagtagcttgtcctctgct

SEQ ID NO: 25732 - DNA, 264 bp, Glycine max
  Clone ID: 701098920H1
agaacccatgccagtctcagctagtccagcgccactgttaggggatcgactgtgtgaaaatggatttgagtgtgttaacattctccctgccaccaatgatgcacatggaggagtcattgtggacttaaaggagcctttgcactccgaagtttttgctactttgcttagatcttcacttttacattggaagcaacagggaacagatggtgtatggaccaagtttcctattgagcttgtcaatcctgttgaaactgcagttaagga

SEQ ID NO: 25733 - DNA, 272 bp, Glycine max
  Clone ID: 701098921H1
ctagctaacaccacttctctctctccctctagtttttctctcttcaaatgggaaactcattgaagactccatgctttcaactcaacaccaattcatcatcatcatcaaaatccgtgaagctcatattttgggaacgaacatcaagatccctaaagggaaaacacatagccggtgagatcatgtttgagtttcctgaaatgatggtgtgccatgcagactctttcttcattggacaaccaattcctgttctatcaattgatgataaactcatg

SEQ ID NO: 25734 - DNA, 275 bp, Glycine max
  Clone ID: 701098922H1
gcttcttcgagtttcacagccaagtcgtaaaagggtttcaagggatggaaaacatgcagagcttctggcaattgggtgatgaactccgtgggcactcaaaagcatcggaggatcacaagtggttaatggtcgcctcgaaactggccgaacagacaagattgaagggggagcgtgtgaacaaccttgatctttcaaagggacccattgaaacaaggtcaagggataaatttgggctccaggaagagaacaaatttgattctcttaacttgagcatg

SEQ ID NO: 25735 - DNA, 279 bp, Glycine max
  Clone ID: 701098923H1
ccctaactaacataacctctgtctccgaaaatgagtggtcacataacgaggaggaacagtgcccctcacaaacgccctccctcgttatccaagaagctccaaaacggaagccttagcgaacctcccagcaaggcttcttctccgccacctcaagagtttgatgggggagaaagaacagttaagcagcttcggttgtcgaaagccctcactatatctgaggtcacgacggtttctgaagcgtgccggagaatggccactcggcgtgtcgatgctgttttg

SEQ ID NO: 25736 - DNA, 271 bp, Glycine max
  Clone ID: 701098926H1
ggccagtagaacccccttgtttattcggcatacacatcgtcgggggctagccatcgagtgcagtgcaaccatcggaaaataatggcagagacagattcgtcgtcctcttcagatggagaaccctcgcaatcgctggcgtcgattgcggagaatcttcagcgttctgccattcaatctgctcgaactgtgcaacatagctcttcaactcatttccgtgcctttcagaattttttaccagaagcagtatcacagtatagaacatatgaagatg

SEQ ID NO: 25737 - DNA, 200 bp, Glycine max
  Clone ID: 701098927H1
caaggatgccggcgttaaggggcagatagccattggattcacctccgagaccttcaagatgcgaagacaaccagggtgggacgccaatagctgcggctatcacggcgatgatggtctgctctaccgtggacatggcaaggggggagagccgtttggcccaacctatacctccggagacgttattagtgccggaattaact

SEQ ID NO: 25738 - DNA, 241 bp, Glycine max
  Clone ID: 701098928H1
ggtgttgtttggcttgcattcttccgtgtggagccctagacttgatccgcatagtgcacttgaacgggtacgtggaagaaatcacgcgtccaatcacggctggggaggttctgaaggcaaatccaaaccatgtcttgagcaaacctagctcccaaggcgtggttcgccggattctgatcctcgcaccggagaccgagctcaagagaggaggcatatacttcttgatcccggcggcatcgtt

SEQ ID NO: 25739 - DNA, 159 bp, Glycine max
  Clone ID: 701098931H1
taagttcgagtgtatttgcgtatgatcacaaagatggtgagaaccccatcttgtgacaaaagtggaatgaggaaaggaacttggactccggaggcagatatgaagttaattgcttatgtcactagatatggctggtggaattggcgcaactcgccccag

SEQ ID NO: 25740 - DNA, 236 bp, Glycine max
  Clone ID: 701098932H1
tcgataatctcggaaacactctctcttccttcaaggaatgctatctagcatagagaggagcttatgttatgtacccttggtctcttgttaagcgtgtaaaaaggtgctgggatagaataaaaacctggttgaccaataattctactgaagcggtggccactctttgtaaaggtgcaactgaagctgacattcaggagttggagaatgtattaaaggtgaaattgcctcttcctaca

SEQ ID NO: 25741 - DNA, 278 bp, Glycine max
  Clone ID: 701098934H1
aaagaacaagctcttacctatttgcctgcattgacaccattttgaagctttttgggctctcagaatcaacttttacaatcacaactaaggttactgaagaagatgcttctaaacgccatgagacagaaataatggagtttggaacctcctctccaatgctcactgtattagccactcttgcattgctcaatttattttgttttcttagtgtattgaaggatgcaatcctaggtgaaggtgacattggagcttatgagacaatggggttgcaagttcta

SEQ ID NO: 25742 - DNA, 220 bp, Glycine max
  Clone ID: 701098936H1
ggcgactaaaaaatggacttcaagcaatcaggttctggtggaaatagcctgcactaagtactctgaacaccagcatgctgcgaggaaggcttaccatgttctttataagaagtctctggaggaggatgttgctcatcacacaacaggagacttccgtaagctcatactacctctggttagttcttatcgatatgacggagatgaggtcaacttgaccctg

SEQ ID NO: 25743 - DNA, 273 bp, Glycine max
  Clone ID: 701098940H1
tgaagatcaagatttccactacaaagttacattatactaccaatttctcactcaaaacttagggaaaatgattgagctacttctgaatttgcagctgttagctcctttcttccttttcttcatctttccagtgtttttcttcttctttctcacgtcctcatgtcctactaaaagaagcatcactatcccaaaaccatacccactgattggtcactacttagacctcaaaggcatcggcaaccgccgtatccagtggctatccgacatcgtcaa

SEQ ID NO: 25744 - DNA, 271 bp, Glycine max
  Clone ID: 701098942H1
actttgtatagcaaaaatgataaaaaccaatagctcccaagattggcctgagccaataatccgtgttcagtccttatccgaaaggtgcacagattcaatccctgagaggtatatcaaacccctcagtgagcgtccatctgatgatgttgttgctgttgatgatgatgatgatgtcaacatcccaatcattgaccttgcagggctttatggtggtgaccctgaagctcgagcctccacacttaagcaaatctcagaggcttgtaatgagtgg

SEQ ID NO: 25745 - DNA, 257 bp, Glycine max
  Clone ID: 701098943H1
ggaacgctagggattcccatgttcctgtactggcgccacttcctattggatttgccgtgttcatggttcacttggctacaatcccaattactggtactggcattaacccagcaaggagtttcggagcagctgtaatctacaacgaagacaaaatctgggatgatcagtggatattctgggatggaccaattgttggagcagcagtgcatgcattttaccaccagtacatccttagagcagcagctatcaaggctctt

SEQ ID NO: 25746 - DNA, 207 bp, Glycine max
  Clone ID: 701098944H1
ctggcacgcaccaggtgttcttccagggtggagggagaccatggaaaagttccatagagagacattagaagtagggaaagcagttgcaaagataatagcccttgcacttgatttggatgctaatttttttgatcagccagaaatgcttggagagcccattgcaactctgcgtttgctgcactatgaaggtcaagtctcggatccctt

SEQ ID NO: 25747 - DNA, 275 bp, Glycine max
  Clone ID: 701098947H1
ggcagcgcagcgatagaagagaacgttcaagaaattcagcttcaggggcgtggatctggacgcgcttctggacatgtccaccgacgaactggtgaagatgttcagtgcgcgtgcacgtagaaggttccagagaggtctgacgaggaagcccatggccttgattaagaagctccgcaaagctaaaagggcagcaccagcaggtgagaagccagaaccagtgcgcacccatctccgcaacatgattattgtgcctgagatgattggtagcatcattg

SEQ ID NO: 25748 - DNA, 278 bp, Glycine max
  Clone ID: 701098948H1
gcatgacacagatactgctgggtctgataccaaaaatacactaagttatgcagctgatgtgtcaaagctacatgttgaagaaaaaaagcactcatattctacaaaagatggccatgatactgaaaaattaggttttggagaggcaacacaggaaagtgttcatcaaccgaaaaggactgcaaagattcatgacttctgtttaggcatcccctttggtggatttgttttaactggagggattattggattcccattttcacggagtcctgcaacactag

SEQ ID NO: 25749 - DNA, 279 bp, Glycine max
  Clone ID: 701098949H1
ggtgtacaacatcttggtggaaaaaacaaagtctgtccctggggctaaggtagaaaataacaagttttgcttgtccgtgcactttcgctgtgttgacgaaaagagttgggtgtcattggctgaacaagtgagcttcgtgctcaacgagtacccaaaacttaagctaactcaagggagaaaactgtttgagattcgaccaaccataaaatgggacaagggcaaggctcttgaattcttgctagagtcactgggatatgctaattctgataatgtatttcc

SEQ ID NO: 25750 - DNA, 274 bp, Glycine max
  Clone ID: 701098950H1
gtgggagatggagaagccacaaaacggacaagaaaaggacgaaaccacggcctctttctgcggttacgattctcttcaccgtcttctcaaggataatcttaacccccatcacttccaggaagtcagccgtttgcttactgggcttaattgtggaaaagcacttgaagcagtttctctcccagaatctgcaacttccctctctgcggaacatggttttgacatccaggccttttccttttgtgctgacaaggaactattaagagaacctcggata

SEQ ID NO: 25751 - DNA, 273 bp, Glycine max
  Clone ID: 701098951H1
gttgtggaaagttaggacgaatgaggccaagtcatatgagcgcgtatgaattttctctgatgctggctcctgttgtttctgtttgggattgcatagttcgcaaaatgaggtactcctacagacctgagtgggtgtagtggttcagaacatatcagtagtattagtcttgatacttcaactaattagaatatatttagcattacaattagggaaagagaggaaaagaattacagaccaaaaaaatgtatacaactctaaagaacttcacttgaa

SEQ ID NO: 25752 - DNA, 268 bp, Glycine max
  Clone ID: 701098953H1
gtctggtccaaaaaaatcaagaacaacaatgggtttgttggatctggagaagcacttcgcgttctacggcgcgtaccacagcaaccccatgaacgtggcgatccacacgctcttcgtgtggcctatactcttcacgggccaaatgatcctatacttcaccccacccctcttgaccaccgtaggttccttcccacggtgttggtcctcaactggggcttcttctccaccctcttctacgccctcttctacgtcgccttggattacaagg

SEQ ID NO: 25753 - DNA, 269 bp, Glycine max
  Clone ID: 701098879H1
cttggcatcttgtgttgtgtccctcttttaagctatttccttcccttaacacaattcgttgtgccaattgccatagtcaccaaccaattaacaaaggtatatatatcatcatatcatcaccacatgacaaatattggttgtcttttcttgtggtggtggctacttttgtcgtggcagccacagctggtagcttttaccaagactttgaaataacgtggggtggtgagcgtgccaaaatctatgagaatggaaaccttctcacactctcc

SEQ ID NO: 25754 - DNA, 264 bp, Glycine max
  Clone ID: 701098881H1
cacaaacagaggtgttgagtgagttcaaatcaattttaggcagaaaaatgaggtgttttggtcttgtagtgataggtctagtggttgtgcttggagggttacccttctcttcaaatgcaggattagatcccttttttacaagaagagttgtccccaggtgcatttcattgtatttagagtcgtagagaaagtttcaagaaccgatacacgtatgcctgccagcctcgtcaggcttttctttcctgactgctttgttcaaggctg

SEQ ID NO: 25755 - DNA, 265 bp, Glycine max
  unsure at all n locations
  Clone ID: 701098883H1
ccacgcgaagaggcgcaggtnagcagtaactcgtggaattgctagcaatggcgaggatcaaggtttacgagctgaggcagaagacgaaggctgatctgttgaatcagctgaaggacctcaaggccgagcttgcttgcttcgtgttgctaaggtcaccggcggtgcacctaacaagctctctaagatcaaggtggtgaggttgaacattgcccaggttttgacggtgatttctcagaagcagaaggccgcgttgagggatgcctac

SEQ ID NO: 25756 - DNA, 183 bp, Glycine max
  Clone ID: 701098884H1
ctagatgctgaaaatcataacagtcagcttcaattttcacttcagctttggtacttaaaatgttagtttttgcataggtaatagtaattgaagcagcaattgtaacaaaatagcaagaaactttccaatttcaacgtgtctaatgaaattcacaatagaatatattatgttctactttgcatt

SEQ ID NO: 25757 - DNA, 267 bp, Glycine max
  Clone ID: 701098885H1
ccatgctgaaagacaggctcttaagaaggaattgaaaaaatataaagacccgaagcgtgtaaatgaaatagaagaacgtatatcatggattgataaacaagtgaagtctgattcagcgaagatattgatgcagaatattggctaagcacaaaaagaaagagagagaagcagcaaagcagggaaaacgtcctttttatctcaagaaatctgaaatacggaagcaaaggcttattgaaaaatataaccatctcaagtcatctggcaaac

SEQ ID NO: 25758 - DNA, 108 bp, Glycine max
  Clone ID: 701098887H1
gacatgacttccttaagctccttagtgctgctccttgcagctctaattctattccctcaagttgttgctggctatgagaagcccccggtgtacaagcctcccattgag

SEQ ID NO: 25759 - DNA, 185 bp, Glycine max
  Clone ID: 701098888H1
agacactagacatatattatttggacgggctgaaaaggtcacgaaagtaaatctcagcacatagtttgtgtggtgtctccctcagtattactggatatcttttaatgttatttctggattttctcttctacaaaatttctatcacaacaaaatgtcagttatgttttaaaataccataagaaaac

SEQ ID NO: 25760 - DNA, 225 bp, Glycine max
  Clone ID: 701098889H1
gcgaaatgagcattgggcattggctcagtccttctgaggcaggtggcgctgccaaacgcagaacctccggcagaaattgccaccgcaaacacgtggaagacgggtagtagtactccatctcccattctctcatattcctttactaattaaagatcatgaacagcgagagacagtcgacgacgacgacgttgctgcacggcaagtacgagctaggtcgtgtgctgg

SEQ ID NO: 25761 - DNA, 268 bp, Glycine max
  Clone ID: 701098890H1
ccaatatattccattctctctgtgtatttccctacctctcccttcaagatgcagatcttcgtcaagaccctcaccggcaagaccatcacccttgaggtggacagctctgacaccatcgacaacgtcaaggccaagatcaggacaaggaaggaatccccccggaccagcaacgtctcattttcgccggaaagcaacttgaggacggccgtacccttgctgactacaacattcagaaggagagtactcttcacctcgtcctccgtctccg

SEQ ID NO: 25762 - DNA, 136 bp, Glycine max
  unsure at all n locations
  Clone ID: 701098891H1
gtgagcagcaccgattaacactatgttgcgaagcgngtgattacaccaccgtatgtgattgtcttctcatcattcagacatcagaaacatgttattccattttataagttcccttacaatgatattatcgcactat

SEQ ID NO: 25763 - DNA, 264 bp, Glycine max
  Clone ID: 701098893H1
cgggaacttaacaaaggaagaaacgcgaattgatgatggaggtcaccaaagacgaagctgcaaccccaggagcaggaggtgctcaacctcgcaatccaaatccaaatccaaatccaactccaaatccaaaccctaccctaaccctcctcacaccaccagaggatctaaaggaaaatcgtgtaagggatgcacctactactcatcgcttcataaagccaagtccaaaaaccccacatgcgttggtttctccagaacactccagca

SEQ ID NO: 25764 - DNA, 287 bp, Glycine max
  Clone ID: 701098901H1
ctcatttctcacctaactttctattcttctcagtctcagatcagaaccttagccatggcagcgttccagaagatcaaggtcgccaaccccatcgtcgagatggacggagatgaaatgactagggttatctggaagtcaatcaaggacaagctcattttgcccttcttggagttggacatcaagtattatgacttaggccttccttaccgtgatgagaccgatgataaagttacaattgaaagtgcggaagcaactctcaagtataatgtggcaattaagtgcgcaac

SEQ ID NO: 25765 - DNA, 281 bp, Glycine max
  Clone ID: 701098902H1
gtctacaaggaagttattgctgaccttaaggcagctggtgcttcatggattcaatttgatgagcctacccttgtcttggaccttgaatctcacaagttgcaagctttcactgacgcatatgcagaacttgcacctgctttgtctgatctgaatgttcttgttgagactcactttgctgacatccctgctgaggcgtacaagaccctcacatctctgaatggcgtcactgcatatgggtttgatttggtccgtggaacccatactcttgatttgatcaaggg

SEQ ID NO: 25766 - DNA, 278 bp, Glycine max
  Clone ID: 701098903H1
caaacatctcaatgggttcttcttctattacaacatcgccctccaatcatgaccatggctgcgatcgtgctcctgttcacggtctttgccgtttcctccgccctagacatgtcgataatctcgtacgacagcgcccacgcggacaaggccgccacgctgcgcaccgaggaggagctgatgtccatgtacgagcagtggctcgtgatacacgggaaggtgtacaacgcgctcggcgagaaggagaagcgcttccagatcttcaacgacaactgcgattc

SEQ ID NO: 25767 - DNA, 258 bp, Glycine max
  Clone ID: 701098904H1
gtccttcttacttagtagacattctcaagccatgacttgtaaacttgtgatctacttcactttcttcttctgcttcctttttaccttggttccttatgttcatatgtatccctcgtacccctatagtggaaattaccagcttgacctcaatttctatgatagatcatgcccaaatttgcaaaggattgttggatatggtggttggttagcctcaaaaaatgacaacagattggccgcgtccctcttcggttgcacttc

SEQ ID NO: 25768 - DNA, 279 bp, Glycine max
  Clone ID: 701098905H1
gaaactcctaattgtcaattgttgtaaagaaaagaactgaaaacactgacactgttattctctgaattttctcaccatctacaactgaagttttaaccaatatggaaactgaaaagtctaatgtttcaaaggctgaagaatttaaactccttgctaatgaagtgttcaatgctcgaaaatactcccaagccattgatctatatacacaagcaattgagctgaacagtcaaaatgcagtttacttttctaatcgtgcctttgcccatcttcggcttgagg

SEQ ID NO: 25769 - DNA, 276 bp, Glycine max
  Clone ID: 701098906H1
gtcgaattggcatcatctgacatcagagaacttggctcaagtgaatattatccatacttcattaaacgccttgtgtccatggcaatggacaggcacgataaggagaaagaaatggcttctgttctgctttcagcactgtatgctgatgtcatcagccctgcacagattagggatgggttttttatgcttattgaatcttctgatgatcttgctgtggatatactggatgcagttgacatccttgcattattcttagcacgagctgttgttgatgac

SEQ ID NO: 25770 - DNA, 273 bp, Glycine max
  Clone ID: 701098907H1
cttggattttgcattgcgcagatgtgaaactattccaaagtcagttttcagagaattgttgtatgcctaagtttatgcgaaatttgacatctctcgaccctatgattcttttcatgttctggtctgaatacacaaatactgagatgtctatgactaggttatagagtatagacccatgtgatgcacgtgttagacattcaattttatggatgaataattaatatagaacaattaaagtaaaaaaacaaccacccaagatgaaaaccacaacca

SEQ ID NO: 25771 - DNA, 259 bp, Glycine max
  Clone ID: 701098908H1
ctctaaaggagtatgaccaagttggtgctgaccttgggatcattcccaaatcttgtaaattctttgctgatgatccgagctggctgacgagatggttaactggggacgaaaaagtaccaaggatatgatgggacattattttgacatgtgtaatttgaacacttatttctgtactattttaactcgcagctccttatacgaaagtcattgttctaagttttctaatcaattgcctggccttagaaatttgctttttttt

SEQ ID NO: 25772 - DNA, 274 bp, Glycine max
  Clone ID: 701098910H1
tggcctcacaaaaacaaaggtaccaaaggaaacttgcaataattctaaatattaaggtagtattacaatacatgttggaatctgttcttgcacgggtgaatttgaagaagaagctgagagctgttagatatggttgtaattggaagaatatcttatttctttagcttctttttctgtctctcttttttggtagtaaaacataattgggtagtgtttgactcttggattttagagcctatttgattcaagaagactggtggcaagaaaggttacc

SEQ ID NO: 25773 - DNA, 275 bp, Glycine max
  Clone ID: 701098911H1
ctgagtttggaaatgatgtggaccggactcatgcagttgaaccagccaagtctgcatttgcaacaaaggccaaagttcgccgagctattgaggctgaaggaattcccttcacttatgtgtcaagcaacttctttgctggttacttcctgcccaacttgtcacagcctggagccacagctgcccccagagacagagttattatcctaggagatggaaaccccaaagctgtttttaacaaggaagaggatattggaacttatacaatcaattctgtg

SEQ ID NO: 25774 - DNA, 293 bp, Glycine max
  Clone ID: 701098912H1
aagacttcatgtgccatgacggtgacttcaccgccggaaacgcaccggaggcgagtcgatctacggcgccaagttcgccgacgagaacttcgtgaagaagcacactcggtacccggcatcctctcccatgcgacgaacgcagcgttcccaggacaccataccggatcatcagttacttccatctagcacgtacgcaccacggactagctcgacggaaagcacgtcgtgttcggacatgtcgtccgatgggatggacgtcgtcaaggagatagagaaggtcggatccactgcgg

SEQ ID NO: 25775 - DNA, 275 bp, Glycine max
  Clone ID: 701098913H1
cttaaatttctgaacattgaacaactcttcacacaacaacacttcaatctggcattgtagcatcatgactggcagagaaatcctccatatgatgaaggtgaaagcagggtttggaacaccagacacagggaatggaaaaggcaaaatatcaaaacacattacacatggctttcacttgatgaagggcaaatcagcgcatcctatggaagattatttagtttcagaatttaagcaagaaaaggacagagaattaggcttgtttgcaatatttgatg

SEQ ID NO: 25776 - DNA, 259 bp, Glycine max
  Clone ID: 701098915H1
gtttcagctatttttctaaagctgtaaaattttatttttgattttctgagatcttagagatgttttttgagggaaaagtcaaaccataaagctatggattttattttcttgttagctcaatcaggtgccatgtttctccgaaggtgtcccattaggggtccaatgtttttgtatttcattagtctcaatttacttatttttgttgacatagtaattgtttaacttgtcagttcataaataacattatcgttatatgctc

SEQ ID NO: 25777 - DNA, 265 bp, Glycine max
  Clone ID: 701098877H1
gcctttggcactggacttcctattaagtctgatgtggctggagacgtgttgaaactacttgttgaggatggagagcctgttggttatggagaccctcttattgctgtgttgccatcttttcatgacatcaagtgaacagccttttcctgttaatgattaatcatgcggcatttttcttattaggggagctattcgcgtattcgcaaaactttttaataggttacaaataaatgtgactaaatatttggtacggaggttccttatt

SEQ ID NO: 25778 - DNA, 78 bp, Glycine max
  Clone ID: 701098817H1
cctttgctgtggcttttgaaggggcatcctggaaggatccggattcaattcctctcatggtcatgcaagccatgatgg

SEQ ID NO: 25779 - DNA, 272 bp, Glycine max
  Clone ID: 701098821H1
ggaacttgatgacaatgtcaaggcaaaacttgctcaattctgtcatgtgccgttgtcaaacatacttactctccatgacgttccaaatatttggcacattcctttgctattgaaagaccagaaggcacatgaggcgatccgaaagcattaaacttgctaggtgttgctgcagagcctaatttgaaggagtggacttcaaggacaaaagtctatgacagatgtcatgaaattgttagaattgcaatggtgggaaaatacactggcctttcaga

SEQ ID NO: 25780 - DNA, 272 bp, Glycine max
  Clone ID: 701098823H1
tacttttgttattattggtggccatttcttccgtgccctcttcttcctgtgccagccaggtcaagtacgcgacactcgtcgcaaaattaataaaacctgagaaatcgagaagggcccgtgtaaggctgcacacgtttttttaatatgggatgaaaactgagaagaggttgttacagtggattgaggttagaggagaaagtctctccatattgatttgaattgttatggatattcagagttgtgacataaaaatggctgcgaaagagtaggtt

SEQ ID NO: 25781 - DNA, 131 bp, Glycine max
  Clone ID: 701098824H1
ctgccgggcaaatctttcaccagtgttcaggatgaaaccaatccaatttgagaaggatgatgacacaaactaccatatggatgtgattgctgggcttgccaacatgagggcacggaattacagcattcctg

SEQ ID NO: 25782 - DNA, 209 bp, Glycine max
  Clone ID: 701098825H1
ccacagtcagacacaataaaaatcaaagagcataatgtcaggcatcattcacaagattggcgagacccttcatgtgggagggcacaagaatcaggaggagcataagggtgagcaccatgctggagaatacaaaggggagcacatggtgaacacagtagtgagtacaaaggagagcatcatggtgaacacaaagctggagacccccatgg

SEQ ID NO: 25783 - DNA, 271 bp, Glycine max
  Clone ID: 701098826H1
cctgaaccattcctccaaggtccacgggttgaaaactatgctaggcatcgttgtgcaatgcgcaatcttcttcaagttccagtaataagagaagacaatgccaaggatagaaggaaattcagaaaaagagaggctgataaagtgcaatcacaagtgacatgctagtggagattttggaagaatccatcagaacaatttggcgtttcataagagcttgataagatgcatccagcttggcacttaaagggtcaagagaaaaccaagtagagct

SEQ ID NO: 25784 - DNA, 256 bp, Glycine max
  Clone ID: 701098828H1
gtcttttatcagaaacttgtatgaattctctcattatgttgcagtgagaacatcatatggaaagcatttagccccaccaccattaacagtggacgtggagctgaatttgagggtgctgtcattgctctattccatttgttataactagaacagacaaggttcgtgcccttcgtgaagcattttaccggcaagaccttcccaatgtgacaaatctcgttgctaacgttttgatcttcctaattgtgatatacgtcca

SEQ ID NO: 25785 - DNA, 270 bp, Glycine max
  Clone ID: 701098831H1
ccatgagacatcagtgcctccttctggtctccctggtgttggtctcctacgctgcccggtcggaatcagcgctgggcggctggagccccatcaaggacgtaaacgacagccacgtggcggagatcgccaactacgcgctgacgagtacgacaagcgttctggggcaagctcacccttgtcaccgtcgtcaagggcgagactcaggtcgtttcgggcacaactaccgtctcgtgctcaaagccaaggatggatccgccacggccagttacg

SEQ ID NO: 25786 - DNA, 274 bp, Glycine max
  Clone ID: 701098833H1
ccatatttcttctcatcgagaagcttcgcgaacgaaaacaaagaaccctagacagatccattccatagccatgtcaggcgttggccctctccctcaggattgggaacccgtcgtcctccgcaagacggctcccaccgccgcgccaagaaggacgagaaagccgtcaacgccgcccggcgctccggcgcggaaattgaaaccctaaaaaagtataatgctgggacaaataaagcagcatctagcagcacttcattgaacactaagaggctggatg

SEQ ID NO: 25787 - DNA, 271 bp, Glycine max
  Clone ID: 701098837H1
gcaaaaccaagtaatactagccaaaatatgtctcccaaatacatgtcccttttcctcctagtaatactagggatggcttttctggccactacttcccttgctgatcgtcgttttctttcggtggaagatggtcatgataccatcaccaccacccaccaaaaaaacactggcctccaaccacacaaaatgaaccttcaaacgtagaaaacaaggagaacactgaggtggaggatggtcatgatcatcaccatcactacccacctaaaaaaca

SEQ ID NO: 25788 - DNA, 271 bp, Glycine max
  unsure at all n locations
  Clone ID: 701098839H1
acncaaaaccctagcggcgcctgctttcttcgttcgtcttttgcatcagccatcaggatggagtctcaggtgaagcatgctcttgttgtcaaagttatgggtcgtactggatccagaggacaggtgactcaggttagaggaagtttttggatgatcagaaccgtcatatcatgaggcatgttaaaggaccagtgagagaaggagacattctcaccctactcgagtctgaaagggaagcaagaaggttgcgctagagggtatttttttcttg

SEQ ID NO: 25789 - DNA, 224 bp, Glycine max
  Clone ID: 701098840H1
cctgtattcttgatattgacgttcaaggtgcaagatctgtgagggccagttctcttgaagccatattcatctttatctgtactccatcaatggaggagctggagaagcgccttcgtgaccgagggacagagaccgaggacagatccttaagcgactacgtaatgctgaggctgagattgagcaagggaaatcttctcaagtatttgatttcatcctatacaatg

SEQ ID NO: 25790 - DNA, 271 bp, Glycine max
  Clone ID: 701098841H1
cggctcgagctagccaccctttaatcttcgtcaacgttacttttccacctcgtacgagggattcacttgagagggaaagggactgatggtagacaacacacagtcttactgggaaggctacaaagcgttttggtcagagagttttcctttttgagcaactattcgaggttcatcaaccgtcataaacccatcccttcctggtcaagctctgatgtcgaggagttcattgcttctgatcctgttcatggacccgtcctgaaaagtgctagag

SEQ ID NO: 25791 - DNA, 271 bp, Glycine max
  Clone ID: 701098842H1
cggctcgaggtgatgtgatgctcctcctatcataattttcactcctgtcaattcagcatttttagtaacatttcagcaagaatgagctataacatgtaaaactgatgtgagctttaagccttatacttgatgtcacaaggttgacatggatgcagcagttaagcttttagtctagttgaaagatgattttgttggcctgacatgctgccaggaggctgaaatgtaaatttgcttggtattgggtattaatgatttgtggtttgccacttta

SEQ ID NO: 25792 - DNA, 225 bp, Glycine max
  Clone ID: 701098844H1
ccaagaggaaggcgaagaccgcaaagaaagaatagttttcagaagcagaaagaggttttccgtcgtttcgcgtttagcgttttgcgttttgagttccgaaacgatgtcctccatggccatcaccaccagggacagagatcagagcttctcatccccgtcgccgacatccccgccggagatgccgccgtttccccttcccccaagccatcgtcgtcggcgtcgccc

SEQ ID NO: 25793 - DNA, 115 bp, Glycine max
  Clone ID: 701098847H1
ctcttttcttcccattttgccccttcctcctttccttgtttccgaggagggccaaccacatatgctaaacaaggaaactaaattctaacctccttcagatctacaccacccttct

SEQ ID NO: 25794 - DNA, 270 bp, Glycine max
  Clone ID: 701098849H1
attcaaaattacactctcattaactaattttagaacatgtatgcaagttcgttttcagctctttctgtgttgtatgctatggcatcttaattggttcgattgaataatctgttaggtctaccctagcaaaacaaacctatactttcttatttccttggtgctttttgtagctttcagataggtttctgtgtgttaatcgaatagacctgaattatttattgtatcacaggttgtgatggcagcagcaccagcagctaccttcgctattgg

SEQ ID NO: 25795 - DNA, 264 bp, Glycine max
  Clone ID: 701098851H1
attttgacagtgcaaccatgaccaacttcaaacttgttttttgctgcagtgtcaaaagttcaggtggagttgacacatgcggccttcagccaggatcctttccttagcagtttgtttttgcctttgcacaagaacttgaccaatattggagagaaagctgcctcatcttggcaattgctgtagctatggacccaaggcataaaatgaaacttgtcgaattcacctttgctaagatatttggtgagaatgctgaggaatggataa

SEQ ID NO: 25796 - DNA, 264 bp, Glycine max
  Clone ID: 701098852H1
ccgctcgagcggctcgagctaatctccatctaatagtgttaatttgtctttctctatctctaacggtcatgcgtgcttttgcttttgatgaggaaaactcctccaccgtggctccggcaacactctacaaagctctacaaaagatgctgacactatcatcccaaagattattggggccatccaaactattgaaatcgttgaaggaaatggaggacccggaaccgtcaagaagataacagctagtgaaggtgaccaaccagtttc

SEQ ID NO: 25797 - DNA, 268 bp, Glycine max
  Clone ID: 701098853H1
gtggagaccgagaaagatgatgaggttaaggtggagtttagtcgtaacggtcacgttcgctgttttgctgttctggattggatcgctgcaagttcaagcctctaattctgtttccgccttcgttcaaaacgccatctatccaacagaatcgccgttttctccaaatcctattgcccctactgtttgcgcgccaaacgcttgcttgctgagctcaatgagaaaccgtttgtggtggagctcgatttgcgagatgatgggtatcaaattc

SEQ ID NO: 25798 - DNA, 106 bp, Glycine max
  Clone ID: 701098855H1
gccatcgtcgtcgtcgtcgtcgcgaagaaaatcgagcacgaaggtgaaagcttcaaccggtgcgaacacgaacctgagcatgctcaacgaggccttccacacaaca

SEQ ID NO: 25799 - DNA, 133 bp, Glycine max
  Clone ID: 701098856H1
ctcgagccgctttaaggaggaagacaaacccaacttcattggttctttctattccaaaactcaaggctatggtcgaagagctcttgaaagaatatgacaatgtgtgcaccctcagggttcgcatgccaatttc

SEQ ID NO: 25800 - DNA, 167 bp, Glycine max
  Clone ID: 701098863H1
gaaacatttcactaatagagagacataagcataatattgagaaataatggaggggtgtacttattgtgtgaagtcgctatgccttgttgggtttgtggtgcttgtgagtactattgcagggggtggagagtgctggtgaatggggaaatctaccacccagataatga

SEQ ID NO: 25801 - DNA, 261 bp, Glycine max
  Clone ID: 701098867H1
gaaaaagctagaaaagttccctctgcttcatcttcttcgtcttcacccttggccgaggaaaagaaacaagaagatcaggttcagctaagactcaacagagtgccagaatcttatgctgctcatatgagacttagactggaagcttcaaggctagaagcttttctcttgcagatctgcaagagcatgatgatgaggaagaagatgatgattgattaaattaacatttaacataggttttttttttttggtttaattcttttg

SEQ ID NO: 25802 - DNA, 271 bp, Glycine max
  Clone ID: 701098872H1
ccctcgagccgaatcggctcgagctaaaacccagaaccagatctaggcgtttattttccttttgttttagaatttgaacaagtcttgcgtcttcaaaggaaataggatgggagaattgaaggacactgaggcttacgaggagagctcatcgactacgaagaagaagaagaaaaagctcccgattccgctaaacccgttactcaatctggcaagaagggttatgttggcatccatagttcgggatttcgagacttcctgttgaaaccagagc

SEQ ID NO: 25803 - DNA, 265 bp, Glycine max
  Clone ID: 701098815H1
cggctcgagatttccatgaactttgactattatatcagtgcgagtactgactttgtgttattagatgagacaactttaatcaatatcattaagcatccagatctgacagtaacgtctgaagagaaagtccttaatgcaatctaatgtttggcatgaatgcaaaacagttgtttgggtgggaagtggtggatcagttaatggaaaattcaaaaccagaactcctttttggtgagaggcttcagttaatctatgacttgttgccatt

SEQ ID NO: 25804 - DNA, 65 bp, Glycine max
  unsure at all n locations
  Clone ID: 701098873H1
ctcgttntgaatatgcagatcttcgtcaaaaccctaacgggtaaaacgattacgctagaggtcga

SEQ ID NO: 25805 - DNA, 91 bp, Glycine max
  Clone ID: 701098876H1
ctcaactttgaaattcttaaaaccctaactggtccgaaccattggagccagcgtgcaatagttcctcctctcactcgctccctccacacaa

SEQ ID NO: 25806 - DNA, 265 bp, Glycine max
  Clone ID: 701098781H2
cttagtttctctcttcacatatcatcatacttcagatagtcagatacatcacccaataattaaattaaatacatgctagcactttaacagtactcctttctctaatatctctctcatatcctcctttctgcggatattcagctaattaaactaagtccctaagatgactgagggaaagctagttgaagctgcagaagctcataagacacttcaggatttcgatcctccaaagaagcgcaaaaggaacaagtatgcttttgcttgt

SEQ ID NO: 25807 - DNA, 261 bp, Glycine max
  Clone ID: 701098782H2
ctcgagccgtgcttgccgtgcttgacattaaatggtctggcattgagctggaagaatggtcgagaaatgagcagttttggctgattggagggaccagtgcccatctagctgcggtgcttcaaggtttgctcaaagtcatagcagggattgacatatcattcaccttgacttcaaaatctggtggtgatgatgtagatgatgagtttgctgatctctatattgtgaaatggacatcccttatgataccacctatcacaatta

SEQ ID NO: 25808 - DNA, 259 bp, Glycine max
  Clone ID: 701098785H2
cgctgtttctccattctgtataacattttccattctctgggcagtttatcgcaacgaatcctttgcctggattggtcaagatatacttggaataacactgataatcacagttctacagattgtacatgtaccaaatctcaaggttggtacagtacttcttggctgtgccttcatttacgacatcttttgggtatttgtctcaaagaagtttttcaaggaaagcgtcatgattgtcgtggcccgaggcgatcgaagtgga

SEQ ID NO: 25809 - DNA, 258 bp, Glycine max
  Clone ID: 701098787H2
aaaaccttgatcaagaattgcagcattaatcttcaaccatggccacacccttggcctaccaagagcaccttccggcggcacccagttggctgaacaaaggtgacaacgcatggcagttaacagcagccaccctcgttggtcttcaaagcatgccgggtctcgtgatcctctacgcaagcatagtgccgaagaaatgggcagtgaattcagctttcatggctctctatgcctttgcagcagttctaatatggtgggtgc

SEQ ID NO: 25810 - DNA, 261 bp, Glycine max
  Clone ID: 701098788H2
gctcccctcacctctctctccgaaatccccaaattgcctgtgaatgctagacaccctaggcacgttcgatttgatgctctcccatttgcaatcaagggcgagcgcattcggttcttgcacgcacaggctggtactaccgctgcatcggcctcgatccctgaattcatcattctttctcgcaccatctttttctattccgattcgatttgttgttgttgttgttgttgttgtgtttttgtttccttccttgacgaatcatca

SEQ ID NO: 25811 - DNA, 259 bp, Glycine max
  Clone ID: 701098790H2
gtcgaaccagacacacttccacgtcaccaccaccgtcgaaggtggcgcgtgaggctgtttccggcgacctataccggcggcgctgagtggtgatcaaggaaatgggtcagaggctcagctgcgtgcaacagcagcacgaggagcatggtgtgctcttcccagcacttgcacgtggagaattggaggttgttgaggccatggtggaggaagaccccactgtgttggaacacaccactggctgtgaccgcctttctcctct

SEQ ID NO: 25812 - DNA, 255 bp, Glycine max
  unsure at all n locations
  Clone ID: 701098792H2
acaatatcctccgccaccatgttgcatatggaaaaccccctcctgcagtcaacaaactcaattaccttcacattctttgggctgttgttatttctctttgttcttacatccatattcagaaaccgtggtcgtgcaacaagataagctatcaccagatgctagaggcgcgtggcctttaattggtcacatccacctcttaggtggctcaaaaccatcccatgtcacgtntggccacatggcggacaaatatggtcc

SEQ ID NO: 25813 - DNA, 256 bp, Glycine max
  Clone ID: 701098794H2
caagcattctccattacatggcatggagaaacattgcaatgtagaaatcgctgcacatgtttcacgcctgtcatcatcaaaacatgaaggggagcaccattctttccagctagaagggttaatggagagtccgtccgtggatgacgatggggactgcttctcgcctttacagttaaacgcaacatccatcaacattgaagtctactataatacagcattgaactataccttgatggttacttttatctcatttttg

SEQ ID NO: 25814 - DNA, 264 bp, Glycine max
  Clone ID: 701098795H2
gcaaataaggacgagattgatgatgatcatgattacccttgtagaagtagtgccagtcatgatgggggcacaaagacagagttggatcatcatacacttgcatcagaagagaaattgggaattgaggaagaggcgggagatatgaacgctgatcttaacttcacagagcccaaattcagagacaggagctacaatgacagcagtaaccttaaagcttatagtggtgagacaactgaatctatgaaggcaacaagtgagacttct

SEQ ID NO: 25815 - DNA, 272 bp, Glycine max
  Clone ID: 701098796H2
gctcgagatctcattggaaaccgaggacgcgctcacgaggttctcaaactgtatcgccctcttgaaggaacgggcaaagccactcttgaggttccgcctcaaagtgtagctggttatgccacagttgctactacagaggatggtgccgaaaggaaggaacgaaacagtggattgagtaaggcaacgaagacaaagagagagcagctcctaaaagctactgcagttgcctctcttcttctaatatacccgaacacttattcattggtcttcgc

SEQ ID NO: 25816 - DNA, 276 bp, Glycine max
  Clone ID: 701098801H1
ctcaggaaagatacaccatgctgtaattggccctttggaagacaataccgtgtacttctaccgatgtggtggaaaaggtcccgagttcgagctcaaaactcctccagctcaatttccaattacttttgctgtggctggggactgggtcaaactggttggactaaatcaacactggcacatatagaccaatgtaaatatgatgtctacctgctaccaggagacctttcatatgctgattgtatgcagcatctgtgggacaattttgggaaacttgtg

SEQ ID NO: 25817 - DNA, 264 bp, Glycine max
  Clone ID: 701098802H1
accattttgagattcatattcatcagtctgtgtacaaaatggcagggtacgcagactgctatggtctatgtgcttctttttggtttctaattgcacagattttatagcattatactggctaataagtcaaggttttgataagcttcaaattcagcgtgaagcaagtaacaggaaaatcatgtcattagttaggtctgctgatctagctccaacatcatatgaaaatgctaagctcttctcactgaaggagcataatgttcgacc

SEQ ID NO: 25818 - DNA, 268 bp, Glycine max
  Clone ID: 701098803H1
actcaaatgaaaaaaactcatgatgacgaattagttgcagatgtccatgccctttcggcaggtctaaaggcttatgtaacatcatacactgcaaagtcactcagcatctgtagggacgcctgtggaggccatggttatgtgctgttaatcggtttggtattttgagaaacgatcatgacatttttcaaacatttgaaggagacaacacagttctgcttcaacaggttgcaggtgatcttttgaaacaatacacgggaaagttcaaagg

SEQ ID NO: 25819 - DNA, 267 bp, Glycine max
  Clone ID: 701098804H1
aatccctctttcttcctcttcctcagtagtgcgattttcgattctcttctctgcaactatgcctaaccctaaggtcttcttcgacatgaccatcggcggtcaacctgccggccgcatcgtgatggcgctctacgccgacggactccgagcaccgccgagaacttccgcgcgctctgcaccggcgagaagggcgccgggcggagcggcaagcccctccactacaaaggctcgtccttccaccgcgtgatcccgaacttcatgtgccag

SEQ ID NO: 25820 - DNA, 268 bp, Glycine max
  Clone ID: 701098806H1
ctataaccaaacactcttcttcatattcttcttcttcttcttgttcttgttctatctgtgacgagcatcatggcctcgagagcagtgctattgttggctatgtgtgtgcttccggccatggttgtcgccattcgcccagcaagaaccctttttgcgtgaagggtcgcgtctactgtgacccttgccgtgctggttttgagacctcagcaaccacctacattgccggtgctgagattatgttgcaatgcaagagcagggttagcaacga

SEQ ID NO: 25821 - DNA, 270 bp, Glycine max
  Clone ID: 701098807H1
cgacgagagtgttttaaaatatattgaacagtcacttgggaacattcactatggaagaaccaacctctctaacggtctcactgcgttggaattaacaggaactgaccgagttggtcttttatcggaagtgtttgctgtactgctgatcttcaatgtgatgtggttgagtctaaggtttggacacacaatggccgtattgcctccttactctatgtaaaacattctagttctgggtctgctattgaggactctcagaaaattaataagatt

SEQ ID NO: 25822 - DNA, 274 bp, Glycine max
  Clone ID: 701098808H1
attcattcaagattcagcaagtgcgttttggaagcagagaccgaaatacttcgagatggcccgtacaaagcaaactgctcgtaagtcaactggaggaaaagctcccaggaagcagcttgcaaccaaggctgcacgtaagtctcaccaacaactggtggtgtgaagaagcctcatcgttatcgccctggaactgttgctcttcgtgagattaggaaataccagaagagcactgagctcctaatcaggaagcttagccgccagaggttggttcgtt

SEQ ID NO: 25823 - DNA, 274 bp, Glycine max
  Clone ID: 701098809H1
ccgacttgatttgatttattcacataaccaatttatcatctctccgatctttcaatggattctgacttctggacctcgcgtcttgctgccgctaaacgccaatacacgcttcagcatcaccatccaaattctcacttagatcgttgggaatcgatgattttgatgtggaagaagaggtgagacctgattttccttgcccgtattgttatgaagactttgacatcgcgtctttgtcttctcatcttgaagatgaacattcttgtgaatcaagagt

SEQ ID NO: 25824 - DNA, 275 bp, Glycine max
  Clone ID: 701098810H1
tcctgtagatcacaacaatatgtttctggatatgggttctttgcaagccgcactgccagacgccctgtttccagccaccttccatggtggtatagctgaatcttggcttcctcaaaacccggtgacctcatgtatatcctacgtggagaaggtggtttgtcattcatggctatgcaatcaccaagttcacaaatacagaacatccagaaaccggaaccagttgcttcgatagggggaaatccttttgcataggattatgctgtagaatgtactat

SEQ ID NO: 25825 - DNA, 274 bp, Glycine max
  Clone ID: 701098811H1
cacaattcacaaccgaaacagtttccatccctctcacaaaatgacaacaatatcaaatcgctcccttctcttcctcttcctcttcctctccaccctccacatagcttccaccctctcaacccccaccaacttcatcaagtcctctgcagcaccacccagtacccagccctctgcatccagtccctctccgtctacgcctccaccatccagcaagacccccacgagctcgtccagacagccctctccctctccctcaaccacaccgaggccacca

SEQ ID NO: 25826 - DNA, 271 bp, Glycine max
  Clone ID: 701098812H1
ccagaccaagtcaagatcgttgcagcaataaaagaagctggaaacgtcaagagatttttcccatctgaatttgggctggatgtggaccgtcacgatgcggctgagcctgtaagacaagttctcgaggaaaaagcgaaaattgaagagtaattgaagctgaaggaattccttacacttacctatgttgtcatgcctttactggttatttcttacgtaacctggcacagattgacatcactgttcctcctagggacaaggtgttcatacaagg

SEQ ID NO: 25827 - DNA, 271 bp, Glycine max
  Clone ID: 701098813H1
ccttctctaagaactcttccaattttttctctctcttcctcttcacgcttcatcgccatggcatcaccagcaagaaccttctttgccttcattctcgccgtcgtcgctctcttcttcgccgccgccaatgctcaagacctctcccggctccgagtcccgatgccggagcggcgggatccgtttcgagctccgtcgccatgatcggagcttcggttgtgctgtcattgatggctatcttgaagcattgaattcgttaatttcgttgggtttg

SEQ ID NO: 25828 - DNA, 265 bp, Glycine max
  Clone ID: 701098814H1
tagaaaagcatttcactgagcaaaatactgcaggtaactctgatgtccataatggaaacgatgttgaacatcaccaggatcattatgcttccccagactctcattcatcaagttttccctcctttgagacacttaaggaggttttgcttcttccctacccaatgatcatcgtgtattggatgacaagtcctcgagtcaccagcctaagagattaccttcaatggacgacgactcgtatttctcataccccaacttatttacctct

SEQ ID NO: 25829 - DNA, 265 bp, Glycine max
  Clone ID: 701098780H2
ctttcttctcattcttcatttcccatgttttctcactctgatctgcaaaaatataaatgcattaattgtctctttatataaaaatgttctatttaattacaatgacaaacaacgctctattgaccacgtcgtctttttcttctgctaaattctctttgtttcgaaaacccaatactttcactgtcaattccaatattttatgttcggaatcaaaacttgcccacaagcttaccaacctgacttcagaattcacctctctgacgca

SEQ ID NO: 25830 - DNA, 265 bp, Glycine max
  Clone ID: 701098735H2
gtttggtgcaaatggattccttagaagacagcggctgttgggattttctcgattactctttcatcgatcaagcgccccctgatttcctttggtccaataacaataatagtgtgagcaccgaaattgacattccaggtgatgctgttgcttgtcaagagaacaccaagaagaggggacgcaccgattcatgcttcaaggcgggatcaaaagcttgccgtgaaaaattgcgaagggagagactcaatgaaaggttctgtgacttgag

SEQ ID NO: 25831 - DNA, 264 bp, Glycine max
  Clone ID: 701098740H2
ctcgagcgctgaaaaaaaatagcttgttcacaccatcctattttttcaactcatatataccaatatatataacatggcttctaccttctctcgaagcctagcacttgtcagcttttacattgtcgtttgtgctgccggtaacttgaaccaagactttcagcttacgtggggagatggtcgtgctaaaatactcaacaacgaaaatcttctcactctctcccttgacaaggcctctggctctggcttccaatccaaaaacgaata

SEQ ID NO: 25832 - DNA, 264 bp, Glycine max
  Clone ID: 701098741H2
catacattgaactttactatatattcgccagtgtttggggccacagaatttacaccatctacagcatcctgttcattgtcttcatcattctcttgattgttactgctttcatcactgtggcattgacatacttccagcttgctgctgaggatcctgagtggtggtggagatcattcctatgtggtggttcaactgggttatttatctatacctactgtctgtattactactatgcacgctccgacatgtctggattcatgcaga

SEQ ID NO: 25833 - DNA, 265 bp, Glycine max
  Clone ID: 701098742H2
atccttgtggcgtgtgtggccactatcacaaatacgaagaaggggaagtgtgttcaatttgcggtcaccggattccggttggatcggagaaaacttcgatacaagtcagtgcttttccttccgttgtcctgccgggatttctttacctaggaagctacgacaatgggtcccgctccgagcttctcaagactcaggggatttctcgtatcctcaatactgttccttcttgtcaaaatctctacaagaactcgtttacctatcactg

SEQ ID NO: 25834 - DNA, 271 bp, Glycine max
  Clone ID: 701098748H2
acccgagcgattcggctgagtttcgctctcacttacggctttcgatttgccaccatagaatccagcctcacacatgttctctgcttctatggaagggcgattatggagcggtatcgtgcttcttccaaaggcaaagaagatatccacacaaaattgatgaccagatacaaagacataccttcttggtggtttcattcattgctgctcgtgacacttctggtttctctcgcactatgtatctttctaaaggaccaggttcagatgccctggt

SEQ ID NO: 25835 - DNA, 264 bp, Glycine max
  Clone ID: 701098751H2
tggaggatcagaatcaaacaacacccttattaccaaacttcgcttagccaaagacacttccttctcttcatgggttctattggaattgagagctcgggacctgaggttgtcaccgttgatgtacatgcaaccaaggatctgatccagaccagtcatgtttatctggatgtcaggacggtggaagagtttcagacagggcatgtggatgcagagaagatcattaacgttgcatacatgtttaatacaccagaaggcagagtgaag

SEQ ID NO: 25836 - DNA, 265 bp, Glycine max
  Clone ID: 701098754H2
caacaacaagttcacctacaattgcgacgcacacaccttcaattacctcgtcgacaatggctacacatattgtgttgttgcagatgaatcaattggaagacagttacccatggcttttctagagcgtgtcaaagatgaatttgtgtcaaaatatggtggtggaaaggctgccacagctcctgcaaacagccttaacaaggaatttgggccaaagttgagggaacatatgcagtactgtgttgatcatcctgaagagataagcaag

SEQ ID NO: 25837 - DNA, 263 bp, Glycine max
  Clone ID: 701098755H2
cgaggagctcctcgttcagtatctatgccgcaaggtcgctggccaccatttctctcttccaatcattgctgaaatcgatttgtacaagttcgacccatgggttcttccaactaaggcgattttcggtgagaaagagtggtactttttcagccctagagacaggaaataccctaacgggtcccgacccaacagagtagcccggtcgggttattggaaagccaccggaaccgacaagatcatcaccaccgaaggtagaaaagttg

SEQ ID NO: 25838 - DNA, 265 bp, Glycine max
  Clone ID: 701098756H2
ctctacgctaattaaggttcattgggcattggcggattctatttccttttctcaaaacccaatttgcttcttcttcatggaagcactctccttcatcatccccaaagactcttgttctcttctccttcgcactccttcttcatattcctcttcgtctgtcagaactccgccgccgccacttgctttcttcaaaaccacccaacactctcactcgcctcaccttctccgtcttcgcgtttttgccctccctaaccccgacgccgat

SEQ ID NO: 25839 - DNA, 269 bp, Glycine max
  Clone ID: 701098763H2
agagtcctgagccctccaagataaggaagcatagcacatcacctgatcaaagcagcccacggaagagaggtgacccggctcctggcaatgataggttggccactctgcaagatgggtctgactacagtgatggtcctagagggaaaagtagaagccctgctagccctgcaagggaccatgatgagggcaactatgatagccctaaagctagtgggcgtaccacagccccagcaggagccctagggaagatgacaggagccccattgatg

SEQ ID NO: 25840 - DNA, 271 bp, Glycine max
  Clone ID: 701098764H2
ctctcattggaaaccgaggacgcgctcacgaggttctcaaactgtatcgccctcttgaaggcacgggcaaagccactcttgaggttccgcctcaaagtgtagctggttatgccacagttgctactacagaggatggtgccgaaaggcaggaacgaaacagtggattgagtaaggcaacgaagacaaagagagagcagctcctaaaagctactgcagttgcctctcttcttctaatatacccgaacacttattcattgctcttcgcaaattt

SEQ ID NO: 25841 - DNA, 265 bp, Glycine max
  Clone ID: 701098766H2
ctcgagccgctcgagccgctcgagccgattcggctcgaggaagctttttctgttttctttccatataatacatgaaaatctctactgggagttgtgattttcaaccataattttagattattaagttttgggcttggggaaattattttgattatattcttagttctaaggtggggtgttaattaatcatccccaactttttctgatgttcagctcagctccccacttaaattcaattttttttgctgtctttttaaagatcttt

SEQ ID NO: 25842 - DNA, 264 bp, Glycine max
  Clone ID: 701098768H2
ctgctcccaaaggttctctttgcaaccttgatgtagaagttgatcttggcctaccccctgatgcagtatataatatagtgatagatcctgacaataggagagccttcaaaaatatcaaagaagtggtatccagaaaagtgttggttgatgagggtcataggcaagtggttgatcttgaccaagcagccatttggaaatttctctggtggtctgggactatatcaatcaatgttttggtagatcagaacagaaaagaccattctt

SEQ ID NO: 25843 - DNA, 261 bp, Glycine max
  Clone ID: 701098770H2
tcgagccggattcggctcgagctcgagccgttctaatctatcctatggttttatatttaacatcaggcaacaaagttcaacacagcatgaattcttggtttgaaatgatttgtcctgttgagaaatgaaacttctagtggaaatatatttgctctgtggcatgttgttcttgcacttaaagcctcacttttgaattgagtctctttgtagtaattgatgccttcaatgtttgagagatggctttgacattgatccttagtt

SEQ ID NO: 25844 - DNA, 259 bp, Glycine max
  Clone ID: 701098772H2
cagctggctggggagtggaaccacacctctggccaatggaatggagacgctaacgacaaaggtattcaaaccagtgaggattacagattctacgctatttcagctcagtaccctgaattcagcaacaaggataagacactagtcttccaattttctgtcaagcatgaacagaagcttgactgcggtggtggctacatgaagttgctcagtggtgatgttgatcagaagacatttggtggggatactccttacagtatta

SEQ ID NO: 25845 - DNA, 263 bp, Glycine max
  Clone ID: 701098773H2
caagaacataacattggatcttatggagctagaaccaaagataggaccggttcatgatcaatacgatgatcttgttggttctttttcttcttcttcttcttcaacatcatcttctgtttctggaatttcaagtgggtcatcattggaatctgattcttttgaagaagtaacatcctctgcctcctcttcttcatcatcagcagctgatgatcaacttgtagttgtagctgatccattgggtgacatggacttctctctttcaa

SEQ ID NO: 25846 - DNA, 259 bp, Glycine max
  Clone ID: 701098774H2
tgtggatgatcattctgttctgcttgctacttatgaaggggagcacaatcatcctcaggcttcttcccaaatggaagcaacatcaggttctggccgtagtgtgacccttggttcagtgccttgttcagcatctctcagcacttccactccaacacttgtttcggctgacttgacaaaatctaagggaagcaacgattccaagagcacaacacctaaaggagattcacctaaagtacctcaggttttggtggaacagatg

SEQ ID NO: 25847 - DNA, 265 bp, Glycine max
  Clone ID: 701098779H2
gtcttcgccaatcgcctgcgtctctctctgaattgactagcttaaatggctggtcctaggattgcccatgctaccttgaaaggtccgagtgtggttaaggagatcataattggaataacacttggcttagctgctggtggtgtgtggaagatgcaccactggaatgaacagaggaaaaccaggaccttctacgatttactggaaaagggtgagattactgttgttgcagaggaacagtgaaaatgttcttgttttgttgcctatg

SEQ ID NO: 25848 - DNA, 249 bp, Glycine max
  unsure at all n locations
  Clone ID: 701098653H1
aaatgtccgttcgtttactattacgatatcagaactgngcgcgttgtggaattgcattggttttggggcacaaagcgtgaagagagagagatggagggttcagacgaaggagtagagatggttgtggattcgaaggacttgcagcaacagagcaaagctttcgacaagctcacagaccgcgtcgaggatcgccaactcgattcttcacgagtccaagatgccatggcatcaattgctgcatcttctgaa

SEQ ID NO: 25849 - DNA, 251 bp, Glycine max
  Clone ID: 701098656H1
ggtcctgctcctggtgtccctcacagccacaccaagccttatgttcgagcaaagggaaggaagtttgaaagggctagaggaaggaggaacagccgaggatttagggtttgatgtgataaatagcgtgttattctctgaaattcaaattttccttatatcttagacagttgaggcagttttcttgttatttgtgttctgataatacgattttctgtatgaagttttcattcttggctcctttattctccaat

SEQ ID NO: 25850 - DNA, 236 bp, Glycine max
  Clone ID: 701098657H1
tctctgccttctctgtgtataaccccgtgacccttctcctcatttctcattctcttttgcttctcacaagacttattatcatcatcgtcataactattgtcactattactaaacttggtgtagaatgacgaaccgtaatgtgaataacacccttgtggagttggcaatgtcgatttcaaacacaagtgctctacctagagctacggtgcctgggctaatggccttgcttggtgggg

SEQ ID NO: 25851 - DNA, 266 bp, Glycine max
  Clone ID: 701098663H1
gctcgacggagacttcagattcggtgccaaggttgcacacggcatagaatgcagcagagcacgtggtttcgcccgacgtgacgtgcgagacgcatgtgcagagcgaccccaagtcgcataacgatgattatcatctgggcctaacgctagacaacgcgtttgactttcagtttaattacttggacgataatcacctttccgtcgacgatgacccctttggcactgttcagtaccaaatgggtcacctctcgcccttgcaggacatg

SEQ ID NO: 25852 - DNA, 273 bp, Glycine max
  Clone ID: 701098664H1
tggaatcggctcgcctcgagcgaatcggctcagtcatatgcacaacaacacacactcaacaaaaatgatgcgtctaagctcgtattttgtcgtagccattgctcttctcttttcatttacaccttcttcgtcagcaaatactcatgaaaactttgttcaatgtctttacaattatccccataataacaatgtcacctcaatctccaacgtcgtttacacccaagccaactcttcatactcctctatacttgacttttccattcaaaaccttag

SEQ ID NO: 25853 - DNA, 190 bp, Glycine max
  Clone ID: 701098680H1
ctagaaagttagaaaacatggcagcggtggccggagcatcctcgtccgtgattaaggtggctgcactttccggatctttaaggaaaggctcttacaagagagccctcattcgttctgctattgagctaagccaaggtagagttgaaggccttcaaatcgagtacgttgatatttcgcctttgccccttct

SEQ ID NO: 25854 - DNA, 277 bp, Glycine max
  Clone ID: 701098701H2
gtcatataccgtgattttaaagcttctaacatcctgctggatgctgagtttaattcgaaactctctgactttggtttagctaaggcgggtcctactggtgatagaactcatgtgtctactcaagtcatgggtactcaaggatatgcagcacctgaatatgctgcaactggtcggttgacggccaaaagtgatgtctacagcttcggagttgtgttgcttgaacttctatcaggaagacgcgcagttgataaaaccataaccggaatggagcagaatc

SEQ ID NO: 25855 - DNA, 273 bp, Glycine max
  Clone ID: 701098704H2
ctcagaatggtttcatctctgcagctgagctccgccatgtcatgacaaatcttggggagaagctgaccgatgaggaggttgatgagatgatccgcgaggccgacgtcgatggtgatggacagatcaactatgaggagttcgtcaaagtcatgatggccaagtgaggaccattcaaccataacctaaatttgaaaagcatataaagagaagagggacagtgcagataagttttgatgagaattctatttccattaggtccatcttgatttgggg

SEQ ID NO: 25856 - DNA, 272 bp, Glycine max
  Clone ID: 701098707H2
ctttatttgagtggcaggggaaagctgtcacttggaattccaattttatgatttcaaaattttatccaatattgttcaagattgtcttatttttagaatgaagtgctgatgaatgttttgctttcttatgattatcgctattggtcaaaagtattttgcccatataacctaaccgaattgatcttttattctttttaggtctacaggtgttatatggattctgaaattttgttttcgcttgtctatatgaagttttgcttgattgagcttta

SEQ ID NO: 25857 - DNA, 269 bp, Glycine max
  Clone ID: 701098708H2
actcgagcgaatcggctcagacaaactcttgttcttactccactctgctctgctttactccaccattgccatggcccgccactcaaaccaaccagcacccggagctgaagggcaaggtgagaaggacccattttgtgagatatcgccgtctccttctccatcgtcggcgacggcgccggcgctggtgctgtcgaactcggggaagcgaatcgaccaggcggggaagaagaagtacgtgaagcaggtgacggggcggcacaacgacactg

SEQ ID NO: 25858 - DNA, 274 bp, Glycine max
  Clone ID: 701098709H2
gcagccgctgtcattgttggatcagaccccttaccagttgaaaagcctttgtttcagcttgtctggactgcccagacaatccttccagacagtgaaggggctattgatggacaccttcgcgaagttggtctcactttccatctcctcacggatgttcctggactcatctccaagaatattgagaaggccttggttgaagccttccaacccttgggaatctccgattacaattctatcttctggattgcacaccctggtggacccgcaattttgg

SEQ ID NO: 25859 - DNA, 134 bp, Glycine max
  Clone ID: 701098710H2
ctaatgcattgcatttatattacatcaaaaaccaatatagaaatacaatgaataagtattatctaatacactatatcttgatgtgttggggagtcgtaatccttaattagtttttcaaggcttccacacaacat

SEQ ID NO: 25860 - DNA, 272 bp, Glycine max
  unsure at all n locations
  Clone ID: 701098711H2
ggcattcggctcacctcngacgattcggctgaggaatcgcactcgtggagggtgctgagtctgttgaggaccagattgaagatgacgtggcggaaagagtggaggatgatcttggttacgatggtgatgacttctagagagtggtgtgatgtttcaggaggaggaggagaaaaaaaaaaaaccaaggaataataatattttaagtttttaaattgattttcctttttttcagtttctttggcgttcgagttatacctttaagggtttcctta

SEQ ID NO: 25861 - DNA, 283 bp, Glycine max
  Clone ID: 701098719H2
cgaattcggctgacgcttggccccggtggagtgcgaattggggcccctgccatgacttctaggggttggttgaaaaggactttgagcagattggtgagttccttcaccgtgctgtgactctcacactggagatccagaaggagcatggcaaacttctcaaggatttcaacaagggcctcgtcaacaacaaggccattgaagatctcaaagctgatgttgagaagttctctgccacatttgacatgcctggcttcctggtatctgaactgaagtacaaggatta

SEQ ID NO: 25862 - DNA, 266 bp, Glycine max
  Clone ID: 701098721H2
gttaaagcatactggaccaggacttctatcaatggcaaatgctggtcctgacaccaatggctcacaatttttcattacaaccgtgacaactagctggttggacggaaggcatgttgtttttggtagcgttctttctggattggatgttgtttacaatattgaagctgaaggaacacaaagtgccactcccacgagcaaggttgtgattgttgacagtggtgaactccctctataattgtacttccttgattctcaaccaggaatag

SEQ ID NO: 25863 - DNA, 264 bp, Glycine max
  Clone ID: 701098722H2
gaaaggaataccaagattaccaccacaaagcaatgggcggtatactttctgcagttcttggcggcgacgcggcggcggcggcgtcttcgccggagagttctacttctagagtctcctccttccactcgtcgccgcgctggcagctctacttcaacgagatcaaagataccgataagctcgttgtgatagatttctcggcgtcgtggtgcggtccttgcaaattcatagagccagcgattcacgccatggccgacaagttcaacg

SEQ ID NO: 25864 - DNA, 266 bp, Glycine max
  Clone ID: 701098723H2
ggtgtttataatggacaattgtgaggagctcattcctgagtaccttggatttgtcaaaggtgttgttgactccgatgacttgccgctcaacatctctcgtgagatgctgcaacaaaacaagatcctgaaggtgatcaggaagaatctcgtgaagaagtgcattgagatgttcaatgaaattgcggagaacaaggaagattacaacaagttctatgatgctttttcgaagaatttgaagttgggtatccacgaggatagtcagaaca

SEQ ID NO: 25865 - DNA, 268 bp, Glycine max
  Clone ID: 701098725H2
cattcttctaagctctactaaaaaaagctacatagacacaatcgaaattatctattattattaaagcaacatggttttgtcatggacaaaagggagagtgttccggcgtgccagaacggctaaggcgttgaaatattctggtggcgacatggagatcgagattgcgctccccacccacttccggtgcccggtaaccttggacatgatgaaggaccccgtgaccgtttccacgggcataacctatgaccgcgacagatcgagaagtgga

SEQ ID NO: 25866 - DNA, 250 bp, Glycine max
  Clone ID: 701098730H2
gctggttcgtgaaattgctcaggacttcaagactgatctgcgtttccagagccacgccgtgcttgcattgcaagaagctgctgaggcataccttgttgggctctttgaggacactaacctgtgtgccattcacgctaagcgggtaaccattatgcccaaggatatccagctggcaagaaggattcgcggtgaacgtgcttgaggtggtggttgtgaagatgaagatgaagatgggttgctgcgggtggtg

SEQ ID NO: 25867 - DNA, 273 bp, Glycine max
  Clone ID: 701098733H2
gaattctgctctggaataccattgttactaccctcttcctgcttctgctgcaacagctgatcatcccaatcataatgatggtgaaacagaagaaacttgtgcagaggaaggtagctctcaacatcagcctaacacatcacagaattgtgtttcataccaaagcaataagcctcgcctcaacagatatgcacttggtggtgctatcttggcttccacaaactccatcctctcaggctatgatattggggtcatgagtggtgcttctcttctaat

SEQ ID NO: 25868 - DNA, 260 bp, Glycine max
  Clone ID: 701098649H1
ggcgctgagagaattttttgacctgacgggggcgttcaatgtgtctgatgctcttccttatttgagatcgttggatttggatggtgcagagaagaaaatgaaaaagacggcgaaagagttagatgggtttgttcaagtttggctggaagaacacaaaagtaaaaggaatagtgaagctgaacccaaaagtaaccaggacttgatggacgtgcttcttagccttgttgaggagggtcaagagtttgacggccaggatgctg

SEQ ID NO: 25869 - DNA, 246 bp, Glycine max
  Clone ID: 701098602H1
gtctccatcattttctcgagagctttcagtttctgtggttcatctttcttcttcttaatctttcctcccctctctgtaaaatcccgcttctctgaatccctttctgctaatcatctgtctttcaagctaagattttctggtttgccttttaattcaccaaaaagcaaacttagaaggatttttcgaaagccaggtgttttcagaaacgagatccaggttttattgtcgaatttcgctagtcatatt

SEQ ID NO: 25870 - DNA, 257 bp, Glycine max
  Clone ID: 701098603H1
ctctatcctgacagtgtggttggaactctttcacatacaacaatgatagatgggcttggagttgctggatggggtgttggtggtattgaagcagaggcagcaatgcttggtcagcctatgagcatggtgttacctggtgttgttgggttcaagttatctggaaaactgcgcaatggtgttacagcaactgacttggttctaactgtgacacaaatgcttaggaaacatggtgttgtagggaaatttgttgaatttta

SEQ ID NO: 25871 - DNA, 256 bp, Glycine max
  Clone ID: 701098604H1
ccaattctcgccaaaacataaggaagctggttaaggatgggtttatcatcaggaagcccatcaagattcactctcgctcacgtgctcgtcgaatgaaggaagccaagaggaaaggacgtcactctggatacggtaagcgtaagggtacaagggaggcaaggcttcccactaaaattctatggatgaggagaatgcgtgtgctcagacgcttgcttcgcaactacagggaatctaagaagattgacaagcacatgta

SEQ ID NO: 25872 - DNA, 252 bp, Glycine max
  Clone ID: 701098605H1
gaaagtgaacgtcaaatagatgatgctctggatattatgtgcgagcttgcagttgctttagaaaagcattgacttgttcatgccttttctgtttttttgctttgtataccatttttagttttaacctttgttggctttcttagacagaacggagtcatcacattcattgtctttatagtctatacaagtctccaaatacacgtaatataatacacgtaatatgttttatagtcgttcatataaagactttac

SEQ ID NO: 25873 - DNA, 252 bp, Glycine max
  Clone ID: 701098608H1
ctgtcatggatcatcaccctgtacactctatggcaaatggttgagatgcatgaaatggtacctggaaaacgttttgataggtatcatgaactggggcagatgctttggggagaagctaggactttatatagtggtgcctcaacaacttgtggtggaaattggggtgaacattgtctatatggttactgggggaaaatccttgcaaaagttccatgacactgtgtgtgccagctgcaaaaagatcaagttgac

SEQ ID NO: 25874 - DNA, 259 bp, Glycine max
  Clone ID: 701098609H1
aacagagcatggctcctctcacattctccttcttcttcatccttatctcttacatttcttcatcatcagaagcgggatcaatcggaataaactatggaagaattgcgaacgacctacctacaccggcgaaagtggtggagcttcttaagagtcaggggctgaaccgtgtgaagctctacgacaccgacgccaccgtcttaaccgcgtttgccaactcaggaatgaaggtggtggttgccatgccaaacgagcttctcgc

SEQ ID NO: 25875 - DNA, 258 bp, Glycine max
  unsure at all n locations
  Clone ID: 701098610H1
cttggctccgctctttggtttgctcaaccgatctccgcagcaacggtgaacgttccgaagacaaagaagacctactgcaagagcacgagtgcaggaagcacacgctccacaaggtcacccaatacaagaagggcaaggacagcatcgccgctcagggaaaacgccgttatgaccgcaaacagtccggttacggtggccagaccaagcccgttttccancaaaaggcgaaaaccaccaagaaaattgtgttgaggctcc

SEQ ID NO: 25876 - DNA, 261 bp, Glycine max
  Clone ID: 701098615H1
cttgttcctctcgcccagtatccgagatcaaccctgacccctaaggccaggggtttttctcggcttcttcagattcctgaaatggcgtctgtttcagctttagtcaagtacaagctcgtcttcttgggtgaccaatccgtgggcaaaaccagcatcatcactcgcttcatgtacgataaattcgataacacctatcaggctacaattggtattgattttctatcaaaaactatgtatctcgaagatcgaactgttcgactg

SEQ ID NO: 25877 - DNA, 262 bp, Glycine max
  Clone ID: 701098616H1
cggaggtggtcgcaggggttactcaaatggtcgtggaggtcgaagtggtggcagaggaggctaccaaaacgggcgcaatcaatactacgatcagcctggaaattattatccaaggaacaactattataacaacagaggaaggggcggcagaggtggtggctattacaacaaccatggtgcaggcggtcaagttaatcatgtcgcaggtgatgtgggggtgcaatcatgataagttatgagttgtttatagtggttattactg

SEQ ID NO: 25878 - DNA, 263 bp, Glycine max
  Clone ID: 701098617H1
cgatcgtgagaggggcagtagccgagattccgtgagttgcaaaaatgaagacgattctttccaccgagaccatgaacatcccggacggcgtgagcatcaaagttcatgccaaggtcatcgaagttgagggcccccgcggaaaattggtgcgagacttcaagcatttgaatctcgattttcagctcattactgacgaaaacggtaaaagaaagctgaaaatcgacgcgtggtttggttctcggaaaacatccgccgccattcgc

SEQ ID NO: 25879 - DNA, 255 bp, Glycine max
  Clone ID: 701098619H1
gagttggtcgatggttcatcatcgggcaaagctaatggggatacgatatctgtaaattttgagggaacacaatctgggtcagatttggttggaagcattccagcatcttctgctcttggtttatctccaagttcatcagttggttcactgtcttctgaaaaatcaactctgaatcccaatgcaaaggaattcaagctttaccctaatgcaaagagttttattccatcggctgctcggcctcccactccagtgtct

SEQ ID NO: 25880 - DNA, 251 bp, Glycine max
  Clone ID: 701098623H1
ctcgagcggcaccagctcaccgacgaccagatcgccgagttcaaggaggccttcagcctcttcgacaaggacggcgatggttgcattactaccaaggaacttgggactgttatgaggtcacttggtcaaaacccaactgaggcagaactgcaggatatgataaacgaggttgatgctgatggcaacggaaccatcgatttcccagagttcctcaacctgatggctcgcaagatgaaagacaccgactcaga

SEQ ID NO: 25881 - DNA, 255 bp, Glycine max
  Clone ID: 701098624H1
caaaggttggaaccgatgaggatgcactcactcgcgtggttgtgagccgggccgagaaggacctgaagataatctcagaggtttactacaagagcaacagcgttcttcttcagcatgctattgccaaggaaatctcaggggactacaagaagttccttctcactctgttggggaaagaagactaaatattttttctctgagggcatttgtgattacgagtttaggacaccaagctatacttgtgtgtgtgtgatg

SEQ ID NO: 25882 - DNA, 76 bp, Glycine max
  Clone ID: 701098625H1
caaactttgtggcttcaggacatactcctctggtctctctgtctctcttcaatcttcctgaagaagagaaagacac

SEQ ID NO: 25883 - DNA, 254 bp, Glycine max
  Clone ID: 701098627H1
tttctttattctctccttcctcttccttcttcttgtttcatctgccactgcttgtgatcgctgcttgtatcaatccaaggcttcctatttctccaaagcttctgctctttcatctggggcatgtgggtatggctctttggcactagacataagtggtggacaccttgcagctggtgtggattctctcttcaaaaatggagcaggttgtggtgcctgctttcagataagatgcaagaacccaactctatgtagca

SEQ ID NO: 25884 - DNA, 257 bp, Glycine max
  Clone ID: 701098629H1
gttgttgtaactcgttctccttcttttgttgttctgtgtttgtgtttgttttttctctcacctgaaaatgtcttgctgcggtggtaactgtggttgcggaagctcctgcaagtgcggcaacggctgcggaggctgcaagatgtacccagacttgagctacactgagtcaaccaccaccgagaccttggtcatgggagtggcacctgttaaggctcaatttgagggtgctgaaatgggtgtgcccgctgagaacgatg

SEQ ID NO: 25885 - DNA, 261 bp, Glycine max
  Clone ID: 701098631H1
cctggttcccatcatggacgaattagaagaaaccctactcacccaattcgactgggaatcgttcctcgacgacatacctgtacttaacgtcgatgattttttgcaggacgacaacgccgttcctgttgttaccgacaatcattcctccccgaacgacgaccccgttttgtccgagatcgagaacatgctcatgacgcaggccgaaaacgacgctgtcgttttgcccgagacgccgtcttcggaggccgggtattacaagct

SEQ ID NO: 25886 - DNA, 263 bp, Glycine max
  Clone ID: 701098633H1
tcagcctccaccacgctctcctctcccttccttcgactggaattaccctccagaacaaagaaacgatcttcatcaattattcctgttccctccatccgagcctctgtctccgagaaaccaccgctaccggctgtgtcggttacctcccctgagccaagcaagctccccatccgcaaaatccccggcgactgccggttcccggtgatcggtcccttgaaggaccggcaagactatttctacaagcagggccgctacgagttctt

SEQ ID NO: 25887 - DNA, 255 bp, Glycine max
  Clone ID: 701098635H1
gagaaagctctgaagcacggtctctccatcttgaacgacctcaaacaacgatcctctctcggctccgatgaatggaccttgtatgagctggttgctgttgctgctatggactgccaatgtctcgacgttgccaaggactgtacaaaggttcttcggaagagattcctagagagtaaaagagttggtaggctggaggcaatgttgcttgaagcaaaaggatcctgggaattggcagacaaggcttacacaagcctt

SEQ ID NO: 25888 - DNA, 249 bp, Glycine max
  Clone ID: 701098637H1
ccgcttgttaaaccaaggtgattcctggtgaatatggtttcgttgcccagcttaacgagagtcgtcacctcaagaagaggccaactgaggtccgagttgataaggtccttcaaccctttgatgagaacaaattcaactttaccaaagtcgggcaataagaggtcctcttccaatttgaagctagcgaggatggacatgtccagttctttccaaatgctccagttgatgttgacaattctcccagctttg

SEQ ID NO: 25889 - DNA, 252 bp, Glycine max
  Clone ID: 701098640H1
tctttctccactgcactaacgcattcttttctttcacctcttcttgtgtcttatttctacctattccaatttccagccaccatgtctggcgaaatgcataccgattccgcgtcatcgtcacgagccgccgccgcctctgatcagcgtcatcagcagccggcggcgtcccctctgagccggtacgaatcgcagaaacggcgagactggaacacctttggccagtacttgaagaaccagacacccccagtttcg

SEQ ID NO: 25890 - DNA, 238 bp, Glycine max
  unsure at all n locations
  Clone ID: 701098645H1
gccgagatggcgtgcatcaggttatgatgttgaatccagtgcttcaagtgatgttattcttaaggccagtgctgctagtgtggcganagagaaagtatataagggacagacagttggcccagtcagatttcaaagtaaatttcaaaattatcttgatntgaanattgatgatggaaatattgatatataggactaaactcatgaacagatagattttcgatcaaagcctaggtttgat

SEQ ID NO: 25891 - DNA, 262 bp, Glycine max
  Clone ID: 701098646H1
ggcggtcgcgagagaggagtggcggaatctttctgaaaaatcgccgcaaagcgaagcgcaagtctcatattaactgcaacttgaactacgaactacgaacatcagggtagtgattaagaaaaaccctagcaatggggaagaagcagcacagcacagacagaatgttcatcaccacaacggagtgtgctacggagtgggtgaggcgctaaatccaaagaaaatcgcactcgcttcaaacgtcttcccttctattgctgctcgc

SEQ ID NO: 25892 - DNA, 261 bp, Glycine max
  unsure at all n locations
  Clone ID: 701098647H1
ctttactatagcagattgaaatagacagcaaatttttggaagcacagcacattatggattacagccttcttctaggtgttcactatagagctccccagcatctacgttctcacgtttcatacaactaaagaaatgaagtggatggantagcaatgcttgcagaggaagatcctctagaggatgaagtattctatccgcaaggccttgttctagttcctcgaggagagagtgatgacagtgttgttgttggctcacacatga

SEQ ID NO: 25893 - DNA, 263 bp, Glycine max
  Clone ID: 701098601H1
gtcatataccgtgattttaaagcttctaacatcctgctggatgctgagtttaattcgaaactctctgactttggtttagctaaggcgggtcctactggtgatagaactcatgtgtctactcaagtcatgggtactcaaggatatgcagcacctgaatatgttgcaactggtcggttgacggccaaaagtgatgtctacagcttcggagttgtgttgcttgaacttctatcaggaagacgcgcagttgataaaaccataaccgg

SEQ ID NO: 25894 - DNA, 279 bp, Glycine max
  Clone ID: 701098566H1
atcctaaaaacatgcgagctctggtgggaagtagattgcctaagttcaccaaatggcaagccaagctagtgaatgcatcatttgattttattggcttaaactattactcctctgtgttatattaatggtgtccctccaagcaacgacaaacccaattttctaacagattctcgcaccaacacttcatttgaacgcaatggaagacccctaggtctaagggccgcttcagtttggatatacttttatccaaggggacttctagatcttctgttatataca

SEQ ID NO: 25895 - DNA, 276 bp, Glycine max
  Clone ID: 701098569H1
ggctcgagcaaatccacttctccaactactcggcgtgttcagcgaagatccgaatcccaacccgaacccgatcgtgatccgagaggtttgggcctccaatctcgaatccgaattcgaactcatccgcgaactcatcgatcgctacccttttacctcaatggacacagaatttcccggtgttattttccgaccacatgtggaccccaccaaacccttcaaccaccgcaaccgtccctccgaccactaccgcctcctcaagtccaacgttgacgctct

SEQ ID NO: 25896 - DNA, 271 bp, Glycine max
  Clone ID: 701098570H1
aagtacgtcatcttggaaccaggcccagcatgtgttggtcatcgcactcactgttagagttagagttagagttagagttggatggagtcgttaacgttgtgaagcataagcaacaacacaacatgagattgaagaggaacaagttggaggacattccggaggaaacagaacttcctcctattggtattgatactaatccagcagagcttgaagaagcgggccttcacttggaaacagatttggaaatactgaggcgggccatggatatggg

SEQ ID NO: 25897 - DNA, 268 bp, Glycine max
  Clone ID: 701098571H1
cactcgagccgaatcggctcgagtcaccgcgcaagcaaaaagaaacaatcccaggcgaggacaaagatggaggggaaggagccggatgtgtcgttgggagcgaacaagttccccgagagacagccgattgggacggcggcgcagagccaagacgacggcaaggactaccaggagccggcgccggcgccgctggttgacccgacggagtttacgtcatggtcgttttacagagcagggatagcagagtttgtgggcacttttctgtttc

SEQ ID NO: 25898 - DNA, 271 bp, Glycine max
  Clone ID: 701098572H1
aagaattatatagcttcaatcatctgatcgagggcattgctagtatggcttcaggagtcaaattctcattcttcatagctcttttcattgtcttggctgcagttggagctgctcacgaggggcatgatcacatggctccagcagaaccaccttctaatcatgcaagcagcctcaaaaaccatgcagtggttggtggactctttccccttctgcttacacttctcattgccagagagaggctttgaaaactctcagtttgccttaacagttc

SEQ ID NO: 25899 - DNA, 273 bp, Glycine max
  Clone ID: 701098573H1
gcaaagttctaatctttcgcctattgggttctactcctttctctcttcgtttccgatcgatccaattttcttcccatggctacgatcggacacaacaatctcaatgccaaattggttcttctcggggacatgggtgctgggaaatccagcctcgttttgcgctttgtcaagggtcaatttctcgaatttcaggaatcaacaataggcggcagcgttcttttcacagacgctggcagtaaatgacgcgacggtaaagtttgagatatgggacac

SEQ ID NO: 25900 - DNA, 271 bp, Glycine max
  Clone ID: 701098574H1
cgggtctgccacaactagacctcttgcgaactggtttcacatatggcatgcgctcatgatcctaacgtgagagcaacacagttgcatgaggatccatctacacatgcatgagtgtcactatcctttataacgagggctccggaaacgagagctataagctgattatctggcgttgagaatggaatacctcgtgcccgtttgaggttacaatcgaaaacctccaaaatccagtatttgtaacataatactgttatattaataatattatata

SEQ ID NO: 25901 - DNA, 271 bp, Glycine max
  Clone ID: 701098575H1
ctcgagccgctttgcacaagggagaaaaggggtcaagaattttgtacaaaccttgggagttgcgagatcttatctgttatagatgatgtttttgtaccacgagaaggtttcagctgaaggagaaatatgatagtggaatatcacaaggaaagaggaaaatccagaaatagtagtatagtacttcctatgcaataagtaaatggatggactacctggctctgtgggcaccagcgctagcttcagtctgagattgggtcagaccatgttctct

SEQ ID NO: 25902 - DNA, 88 bp, Glycine max
  Clone ID: 701098577H1
ctttccgattctctttctgagatccaaaagccttactttttctccctctcaattctccttctaatctctagaatccgcttcttcaatt

SEQ ID NO: 25903 - DNA, 269 bp, Glycine max
  Clone ID: 701098578H1
cgcactccgtcttcatcaatcaccatcaccaccgctccaatacaggggaaaactcacggagatccttcacgttcagggagggcaatgcgggaaccagatcagttcgaagttctgggaagtggtgtgcgacgagcacggcatagatccgacggggaagtacgtcggaaactcagatctacaactcgagcgcgtgaacgtgtactacaacgaagcttcctgcgggcggtttgtcccacgcgcagtgctgatcgacctggagcccggagcca

SEQ ID NO: 25904 - DNA, 278 bp, Glycine max
  Clone ID: 701098579H1
ggaatgtttgaggcagagttacatgatattcttagcaaagctgaagaagcaccatttttcacctggtccagaatcatcggcatgccaactttttccacttgatgatatacctttcaattctttatccttttcatcaatggtggttaccttaagtttgtatgttgaggatattaaggctggaaagctcaaattccattatggaaccattaacaaaaggccgggtacaagtccttctgatattcgtgcctatacactggatcaccatatgcattcatgag

SEQ ID NO: 25905 - DNA, 280 bp, Glycine max
  Clone ID: 701098580H1
atggtgaaggagtggttaagctaggaggaaggatactcaagatgatgtcaataaaccttggtttgaaagaagatttccttctcaatgcatttgggggagagagtgaggttggtgcatgcctaagggtgaatttctatccaaagtgccctcaacctgacctcacttttggactctcccctcactcagatcctggtggcatgaccattcttctccctgatgattttgtgtctggccttcaagtaagaagaggagatgaatggattacagttaagcctgtcca

SEQ ID NO: 25906 - DNA, 278 bp, Glycine max
  Clone ID: 701098581H1
gcttgtttgggatgatagaacatcagttggtttgttgaaaaaagatggactaatggctactcacgatgaagaaactgcacagttctttgaaggcactgaggtgcattgtgttttatgcccccgcaatcctgatgatggtggtagcattgttcaggatttacaaatttctaccatgtttactcatcaccagaagatcgtggtggttgacggtgcgatgccaggtgaagggtcagataggcgaagaattgtgagttttgttgggggtattgacctctgcg

SEQ ID NO: 25907 - DNA, 273 bp, Glycine max
  Clone ID: 701098585H1
ttcacatattatatcatcacatatcatagtgatatattatatcatatcacaatgtgtggcatacttgctgtgcttggttgctctgattcatctcaagccaaaagggttcgcgtccttgagctttctcgcagattgaagcaccgtggtcctgactggagtgggctccaccaatatggtgataactatttggctcatcaaaggttagccatagttgatccagcttctggtgatcaacccctcttcaatgaagacaaaactgtcgtggttacggtg

SEQ ID NO: 25908 - DNA, 269 bp, Glycine max
  Clone ID: 701098587H1
ctcagaactcagcaaggctcactgttcctggaggaccaagtgttgcatgtagcacagcaaaagctgttgagtgggatgctgcttggtctaacaaccttgatccatcaggtagagcagcacttggagtgcatgcatcagcttatggaaaccaggtcaaagctgtagaaccagagaagatcatacccacgatggaagtttctccactaggagttgccatatagagcctgtatgagccatagcaaggactagtagttgccctagaaccagca

SEQ ID NO: 25909 - DNA, 273 bp, Glycine max
  Clone ID: 701098588H1
gtcctgttccatctcgttggaagggcacctgcatgaaatcacaagacttcaattcctccaattgtaacaggcaattaattggcgcaagattttacaccgaccctactggaaacgatgacgacgaaggggacaacacgccaagggattcggtggggcacgggacccacgtggcatcgacggcggtgggtgccaccgtgactaatgcatcgtactatggtctggcggcggggagcgcaacgggtgggtcctcagaatcaagattggcagtttaca

SEQ ID NO: 25910 - DNA, 273 bp, Glycine max
  Clone ID: 701098589H1
gttctcttcaccattctctttcttctttgtttcaagtttcaacaacccagattcactctctctctcgtaattttctctcttattgaggctagaaaaagagagcaaaaaaactaaaaaatgcctgcggtcggaggtataaacaccggagggggcaaggagtaccctggaagcctcactctatttgtgacggtaacatgtatagttgcagccatgggtggtttaatcttcggttacgatatcggaatttcaggtggagtgacgtccatggatccg

SEQ ID NO: 25911 - DNA, 265 bp, Glycine max
  Clone ID: 701098590H1
gtagccaaatgcctcgtcatctaattagtgacgcgcatgaatggattatcgagattcccactgtccctatctactatctagcgaaaccacagccaagggaacgggcttggcagaatcagcggggaaagaagaccctgttgagcttgactctagtccgactttgtgaaatgtctttagaggtgtagctctaagtgggagaagtaattcgactttgaaataccactactctgaacgatattttacttatttaattgggtagagatga

SEQ ID NO: 25912 - DNA, 273 bp, Glycine max
  Clone ID: 701098592H1
ggaggaaataccacatgcattaagagtttctcctaacgccgcctgtttagtcttagattctctgaaggggttttactgtacagaagtgtcaaatcaggacgtaaagaaggatgctaactttctgggtgttcgccgaacatgtatcatgctgatggaatgtctatgtgatttcctgagcaactcaggttgtgtttctaatgtaatttcagaagatatcaaggaccgggctaaggcagttgctgaagaatggaaacccagattggatgctcttga

SEQ ID NO: 25913 - DNA, 274 bp, Glycine max
  Clone ID: 701098593H1
ctcatatccttatcctgtttctttcaatggaagtcatttctgcttctagcttgaatcccaacgctccgatgttcgtgccactcgcctatcggacggtggaggatttctccgaccagtggtgggacctcgttcactcctccccctggttccgcgactactggctccgcaagtgcttccaagatccccagttccaaaacgacgacgctttcgacttcgactttgacctagatctccaagatgaagatgaaagggaacgaaaggaagggaaggaggt

SEQ ID NO: 25914 - DNA, 279 bp, Glycine max
  Clone ID: 701098594H1
attcgtttgtgctgccgctctctgagaaaaacagatagtgtgggagagagaagagcggaagagaaaatgacgaccaggttcaagaagaacaggaagaagagaggtcacgtcagcgccggacacggccgtatcggaaagcaccgcaagcatcccggaggtcgcggtaacgccggtggcatgcatcaccaccgtatcctcttcgacaagtaccatcctggtttcttcgggaaggtaggcatgcgctacttccacaaacttcgcaacacattctacaatccg

SEQ ID NO: 25915 - DNA, 279 bp, Glycine max
  Clone ID: 701098595H1
cagggaatggagaatatttaatggagttagccattggaaccccaccagtgtcttaccctgcggttttggacactggcagtgaccttatttggacacagtgcaagccttgcacgcagtgttataaacaaccaacacccatttttgatcccaagaagtcctcttctttttccaaggtttcatgtggtagcagcttgtgcagtgctgtgccttcttcaacatgcagtgatgggtgtgagtatgtttattcatacggtgactattcaatgacacaaggcgttt

SEQ ID NO: 25916 - DNA, 260 bp, Glycine max
  Clone ID: 701098565H1
ggctgctggtattagtatgggcttactcatggttggaactggcagtgataaggcaaatgagatgctcacttatgcccatgagactcaacatgaaaagattattagggggttagcattgggaatagctcttacagtttatggaagagaagaagaagctgacactttgattgagcagatgactagggatcaagatccaatattgcgttacggtggcatgtatgctttggccttggcgtataggggaacagcaaacaataagg

SEQ ID NO: 25917 - DNA, 273 bp, Glycine max
  Clone ID: 701098525H1
aaaaaataaacatatattgagaatggagggttgtgtgaagaagttgctatgccttgttgggtttgtggtgcttgtgagtactattggtggggtggagagtgctggtgaatgtgggaaatctacaacccctgataatgaggcttataagcttgcaccatgtgcctcagcagcacaagatgagaatgctagtgtttctcagagttgctgtgctcaggtgaagaaaattgggcagaaccctagttgcctctgtgcagttcttctctctaacacagc

SEQ ID NO: 25918 - DNA, 271 bp, Glycine max
  Clone ID: 701098526H1
ctggaaagacccacgtgccggttcttcaatcttctagagagagagagagagagagagacagagatggcgttgaatcctcaactgtttccaaatggaatgcccgttcctttcgtgaacgagatgtttgtgttggccagagacggcgtcgaattcgaggtcgataagattcctgcctctggcaatcatgggggtaatctcaaaacaaagggaatcgtgtatttgtcgaatattcggatggtcttcgttgctaaaagtccagttggacacttca

SEQ ID NO: 25919 - DNA, 281 bp, Glycine max
  Clone ID: 701098531H1
gaacagaagagatttaggcagcccgaaccgacgatgttgtttttaactgacagcagcagtaagcgaacactaacactaacgtgaaacgcgttgcgttgtcggaaaatcaccctcacctgatcactgtggaagtctctaggtgatggccggttcagaacctgttagggcagagggagagactatggctgtggatgctgccccaaggaagccccggattctacttgctgcgagtgggagtgttgctgctgtcaaatttgcaaatctttgtcactgtttctctg

SEQ ID NO: 25920 - DNA, 282 bp, Glycine max
  Clone ID: 701098532H1
cggagcgaaggggtaagagaaattaccaccgcaacagttgaggtgtgttaatttctgacatccaaaacgaaacaaaaccccatcactgaactgagaaagaggctaccaacagacaccacctattttatgcctttcttcttcttctctcgacaatggtggataaaccaatgagcattcatcgaacccggttcccattctcgatcaccaagctcctcttctggtcgcttatcctactcagcttcattgtgctcttcttcttgggatctcccccgtcctccgctt

SEQ ID NO: 25921 - DNA, 94 bp, Glycine max
  Clone ID: 701098533H1
tttgagtattctaaaaatgctcttttattgagaacacaaggcaacgtttaagctacaccagcatccaatactaaaagagcattttgagtattct

SEQ ID NO: 25922 - DNA, 276 bp, Glycine max
  Clone ID: 701098534H1
caggagctcagtgttgggtgagagtgagaagcacaagtctgatgttttcccaggaaactctagtcctttttccaaggacattgaagtgaatgggaaggaagttgtcatgtcaaatgtagaggagtatcttggagtgcttgatgtttacatacatcaggccagggacattcaaaacatttgcatataccacaagcaagatgtttatgctaagatttgtctgaccagtaatcctgagacaactgtgtctaccaaaaccatcaatggaggaggaaggaa

SEQ ID NO: 25923 - DNA, 276 bp, Glycine max
  Clone ID: 701098535H1
ttttcggatgatatcacctaaaggctctcgcatgtctccacaacttcttgcagtgttgcaagcttttgaggcaacattggcagagaggctgaaaaatcttatgcctaaaagcaaggatgaaatcctcaccttgtcttggatgactttagctatgaagtcactttgtgaaagtcacaatgacatacggacccttatgactgcccttgagcttcctgtgagtgattgggaggacaaatggattgatgtgtacttggacataagttcaaagttgctaga

SEQ ID NO: 25924 - DNA, 212 bp, Glycine max
  Clone ID: 701098536H1
caacaatgcagggcaagaaaaagacaacaaattgccttctcttcctgttcctctccctcaccctctctctctctctctccgccgcattacaactccaaacccaaacctctgcccctccactccctcccccacccacccgcaatctcatggcccgaatccgaatccgaacccgacccagaagaagaagctctctcacttcacctccacacaac

SEQ ID NO: 25925 - DNA, 274 bp, Glycine max
  Clone ID: 701098540H1
gttactcatttcttctcatcttctttttcttccctttaaaattattattccgtgcaaacacaacaacaacttcatcaccaacacgaagaacaagattagcgttatgggtctcttcctttctaggaatttggcttgcaaattcatatacccttttcttttttccaataaggtttcaaaggatttgttccccaagcagttggagaacatgatgtctctggtctctcctcgtactggcaggcatttgcagcgctatgacaaaggctgtcgccaagtt

SEQ ID NO: 25926 - DNA, 273 bp, Glycine max
  Clone ID: 701098541H1
caccactaagtttattagtattattatcactagctacctgctatcaaagcatcacaaatggcttctacagacaagcctggcggcgaccctgaatacagaacatcttcaactccagctcctgctggtgttgattactttaaatttgatgtcatcctaaggtttctattgtttgcagcatcactggtagctgttgtggtgatcgtcactgctaatcaaacagaggttattcgtgttccacagcctgtgccatggccagccaagttcagatactca

SEQ ID NO: 25927 - DNA, 268 bp, Glycine max
  Clone ID: 701098543H1
cgaccagattgtgggtgcggtcttggtggagaaggaggatgccgtcgttaaacaggagagcacggcgaggttgttgatgaactccatttcgcccaattgccaattcgacacatgcctttgcctctgcaaccctaatcacattggttaattctaagttgattcggttaatatgaattgttctcgagtttttcttccctgtcaattaattgaattgggtagatgaatacaagcaccaaccaaacgtctaggggagcgaccattctgtact

SEQ ID NO: 25928 - DNA, 279 bp, Glycine max
  Clone ID: 701098547H1
ctaggatttcggccgtttgctccccaaggaaagaagcagagtgtttcttttgaaatcagctagaaaagatgtcaggtgaagaggtagctgttgcagctgaggcacctgctgcttcaattccaggtgagccaatggacatcatgactgctctacagcttgtgctgagaaaatctctggcctatggtggtcttgcacgaggtcttcatgaaggtgctaaggtgatcgagaagcatgctgcacagctctgcgttctagcagaagattgtgaccaacctgatt

SEQ ID NO: 25929 - DNA, 279 bp, Glycine max
  Clone ID: 701098548H1
cacagcacaactcccatgctcttctcactaactcaactcacgaccaagatggaccttctctccctccaaaccaatgggatttgctcaacaggcaccggcctgcattctcaaggaaaaagtctggtaagagcaggctacaatttgtgacaactactggtgatgaaattgaagacgaaatttcttctggcaacgtaaaccaccaaagttctctgcataattctggtttcaacagcttttcaccaactgtgtcttgtataggactatttactcattctgtgc

SEQ ID NO: 25930 - DNA, 272 bp, Glycine max
  Clone ID: 701098549H1
ctcgagtctaatttgtgatacttttgtgggtaagggggaaaagcagcagtaaatctcattctcattgtaattagctactgctgtattctctctttctgctgctccatatttcatttcatctctgattgcgctactgctaggctgtcttcaatatttaattgcttgttcaaaatagctaggcatgtatattattattctttttctcttggcccaattaaagatgcaattttccttgtgaacacagcataattcttattcttatttatttttgt

SEQ ID NO: 25931 - DNA, 272 bp, Glycine max
  Clone ID: 701098554H1
ctcgagccgattcggctgagggcagttgcagaagcagttgagaaggtgaaagggggctctacattactattgggcaagttccaggccccatcagagggtaactacagtttgacttgctattgcctgtgtgatgcttggttcggctgttacacaaggacaaatttaaagctcaaagttttgagacggactcgggctggcaccagggctgctgtattcgctgatgaaggacctatcatggaggattgagttgaggaggatgatgacaacgacga

SEQ ID NO: 25932 - DNA, 270 bp, Glycine max
  Clone ID: 701098556H1
gcaccgcagagacagagaggtaaaagaaacgcaaacaacgatggctgtgaaaggatcaccacaacggtgggacatgagattagttttgacaattactcttcttttaatttcggtctctgtttctgctcttcaacacgtaagtcacacccaccttaatcccaccacccttgagacatcccaaactagttttactcgtaaagtcgtgaactttttgtggagctcatctggctctggataccacatacttggccggatatagaatttggatgg

SEQ ID NO: 25933 - DNA, 101 bp, Glycine max
  Clone ID: 701098557H1
cgcgaaagaagaaccctggaagagagcgatccataatccattgttaacaacaaacaaggacacgcaagacaaaagcccgaaactcataggtatacacagct

SEQ ID NO: 25934 - DNA, 272 bp, Glycine max
  Clone ID: 701098559H1
acgtattctgctcaaaatgtaaagagaaaggttcacaaagtggaacagctggtaggtgttttggatgccaaggcactggtatgaaaattacaagaaggcagattggactaggcatgattcaacaaatgcaacatgtctgtcctgactgcagaggatctggtgaggtcattaacgagagagataaatgtcctcagtgcaaaggaaacaaaatttcccaggaaaagaaggtgctggaagtgcatgttgagaagggtatgcagcagggtcagaag

SEQ ID NO: 25935 - DNA, 275 bp, Glycine max
  Clone ID: 701098560H1
ctttgcaatcagcaactggggttgtgcctgtcttttgtgctgaaatacgtttgcatgagacatccgaaggattgccttgggatagctataccgaggaactggtatatatgatttgagttgatggaattttggggcattacgaagatacaagcaggcgcatcccgggctgaaaaatgataagataaccccctttaccttactgaagttttgtattgtttgggattaaggtgaaattgttcgagaaagcattacatggaatggttttgtcgaaaggg

SEQ ID NO: 25936 - DNA, 266 bp, Glycine max
  Clone ID: 701098562H1
agaaaagtcaaagacaatgtcagggatcattcacaagattgacgagacgcttcatgtgggaggccacaagaaggaggaggagcacaagggtgagcagcaccatggtggagaatacaaaggggagcatcatggtgaacacagtactgaatacaaaggagagcatcatgttggtgagcacaagccggagcaccatcgaggagaagagcacaaagaggggttcctagacaagatcaaggacaagatccacggcgaggagggtggcgcac

SEQ ID NO: 25937 - DNA, 284 bp, Glycine max
  Clone ID: 701098523H1
gctcgagggcggtttccgttggagaagggcgtttgtccaccatggtggcctactgggaatgaagagttgtggcgccaaataggtttgccgaaagatcaaggtcctcctccttacaagaaacctcatgacttgaagaaggcatggaaagtgggtgttctgactgcagttatcaaggcacatgtctcctgatatcgccaaaatttgcaagctcgtgaggcagtccaaatgccttcaagataagatgacagccagggaaagtgcaacctggcttgcaatcatcaatc

SEQ ID NO: 25938 - DNA, 254 bp, Glycine max
  Clone ID: 701098488H1
catggatggaatcttccagttgaatgcgcccgcactcttcaaatctcaaccatgcttctgaagaaaggagtggagacggggatgaccccctttgccattggaagtcttatgtgcagggaatccttgaacaaggagtctgtgattgagggaattgtaaaggcagctctggattctgaccttcctggcacaagtgaagccacgtttctggatgctgtttctgaaatcatggaccagcaccttgattagatcaccgg

SEQ ID NO: 25939 - DNA, 254 bp, Glycine max
  Clone ID: 701098489H1
ctcaacaccacccgcgaaaccgccaagcagatcgccgattccaagcctctcctcgccctcacgatctctgattgactccccaaaatcaccgcagctggtcgctctctaccaatcgttctcatggacaacgacggcgccaataataacaataacaataataatatcgtgcccactcttgatgagatggcgaagaaggaaccggtggctcagcgcgtgacagagcgcgtggagcaggacgacacggccacgctgct

SEQ ID NO: 25940 - DNA, 254 bp, Glycine max
  Clone ID: 701098493H1
caaaggtcgacgcaagacgctacaagaggttggctatgtgactaccatatgcttttcatgcttccttatcagatgtgttatgatgtgctttaatgcatttgataaagccgccgaccttgatgtcttggaccatcccattctgaattttatatattacctgtttgtggaaatattgccttctactttggtccttttcattttgaggaagcttcctcccaagcgtggtatcacacaatatcacccaatacgctgaa

SEQ ID NO: 25941 - DNA, 259 bp, Glycine max
  Clone ID: 701098496H1
tgcaaatcgagatcctgctcggaatcatcaacctctactctctgataggctcatgcctcgcccgcagaacctccgactggataggtcggcgttacacgattgttttcgccggcgccatcttctttgtcggagcacttctcatgggtttctcccccaactattcctttctcatgttcggccgtttcgttgccggcatcggcatcggctacgccctcatgatagcccccgtctacaccgccgaggtctccccggcctcctt

SEQ ID NO: 25942 - DNA, 258 bp, Glycine max
  Clone ID: 701098501H1
gagcgattcggtcgagctcgaagtgatgattgggacgagggatgggaaaacctactggaagtagacaatcctgacgaaagagaagatagaagactctgtttttgttcaccctttgcatctttgttgggctgagattttaagaaaattcataagcctgtcaaggtttactgatgtgctgagactgattgatcaatcatcattaaaacctaatgctatgttgcttgatgaagatgatgccagtagcttaacccggatagc

SEQ ID NO: 25943 - DNA, 278 bp, Glycine max
  Clone ID: 701098502H1
gccttttccatggcagcatgatttgtttgaagatagcctaagagctgcagggattcaaggagtagaagttggcaccaagttgtatgtttccaatttggaccatggagtgaccaatgaagacataagggaacttttctctgagcttggagagttgaagcgttttgctgttcattatgacaaaaatggacatccaagtggttcagctgaagtcgtttatactagaagaagtgatgcatttgctgcccttaaacgatataataacgtacttttggatggaa

SEQ ID NO: 25944 - DNA, 278 bp, Glycine max
  Clone ID: 701098506H1
cagaaagagaaagagaatggacgccattgattctgtgttcgatccgctgagagaattcgcaaaggacagcgtgaggctcgtgaagcgctgccacaaacccgatcgcaaagaattctccaaggttgccgtccgtactgcaattggtttcgtcgtgatgggattcgtcggtttcttcgtgaagctcattttcattccaattaacaacatcattgtcggatctggttaggatgaagggaactacaattgcctcagaattcaggttgtcaagcaaaaggagg

SEQ ID NO: 25945 - DNA, 275 bp, Glycine max
  Clone ID: 701098507H1
gcgcgaagttgccccctcaacgtgggagagtgtcgctgaagaagttgtttcgggtacggctaagagatttctgggaatctcatcctgaggaatgccagcacacaaaccagttgttgggttatcatggcaaccacagttgcctattccatcatcattcaaagccactgatgggtctcataccaaacctcaaactgaggcatcaagcagcactgttaggaaatccagttcagagctggttgatggccttttcgtccctccaaacgatcccagaaaat

SEQ ID NO: 25946 - DNA, 275 bp, Glycine max
  Clone ID: 701098508H1
cctcgagccgaatcggctcgagcttctctctccaccatgcaccaaaccatttcccacagaagcttcatccccataggagcacctggcatgccacacgcaggaggaatcaaagaatccaatggcacctatccatccaaagctgccacaatggtatcggagaacgcggtggtaatcattggaaaacggggatgctgcatgtgccacgtggtaaaaaggttgtcacaaggtctgggagtgaaccctcccgtgtacgaggtggacgatgaccacgaagc

SEQ ID NO: 25947 - DNA, 279 bp, Glycine max
  Clone ID: 701098509H1
gtgcaaaagagcgtcgtagtcgcaaccctaatcagaagaagcgcagcttcaagcgagtgacagccaccagccatgggtcgtatgcacagccgcggtaagggtatatcctcttctgctttgccctacaaaaggacacctcctagctggctcaagatctcttcgcaagatgtcgaagaaaatatctgcaagtttgcgaagaaaggtttgaccccgtctcagattggtgtcattctcagagattctcacggtattgctcaggtcaatagcgtcactggcagc

SEQ ID NO: 25948 - DNA, 277 bp, Glycine max
  Clone ID: 701098510H1
cttaaaatgggtcccatcagccaggtcttttctatgctaccaggatttagtgctgaattaatgccaaaaggccgtgagaaggaaagccaggcaaaaattaaacgttacatgacaatgatggactcgatgacaaatgaagagttggatagttcaaacccaaagctcatgaatgagtcccgaatgatgcgaatagctcgaggttctggtcgtccagttagggaagtaatggaaatgttagaagagtacaaacgtcttgcaaagatatggagcaaaatga

SEQ ID NO: 25949 - DNA, 275 bp, Glycine max
  Clone ID: 701098511H1
gcaggctgctccagagagggtctcattggatacgtctcccgacaagagttcaaggccagttttggaaaagaaattagaatccaatggagaagacatgaaaagagtagatgggttgaaggaagtgaggaagaacagaaaaccattcccaacgtggatgatgttattactcttctccatctttggggttgtaatggcattaccactgcttcagctgtgatgataggcaaagaaatctttataggagggtataagggtcccaaaagttttctcctgga

SEQ ID NO: 25950 - DNA, 276 bp, Glycine max
  Clone ID: 701098513H1
gaaaatgtgtgtgatagattgcttcttcctttccagcatgaggagaagtggtcagaaaatctgagatctaaattacccaagacaaaggaatcacttgagggtgctgatggccccaccttacggtggaggcgtaatgtactacttgttgaagcttcacataatccagattctggaagagtgatccaccatgcccgggaacttgagtcattttgtgctcgtaatggcatacgtttatccctaatgcagggtttgtctgggattgtaaaaacagtgcca

SEQ ID NO: 25951 - DNA, 280 bp, Glycine max
  Clone ID: 701098514H1
gccatggagcagctttacagtcttggagcattggatgaagagggccttttaactaaattagggaggaaaatggcagaatttcctttggatccaccgttgtctaagatgttgcttgccagcgtggaccttggatgcagtgatgagattttgaccataattgccatgatccagaccggaaatatgttttacaggccaagggaaaagcaagcccaagccgatcagaagagggcaaagttttttcagccagagggtgaccatcttaccctacttgcagtttatg

SEQ ID NO: 25952 - DNA, 282 bp, Glycine max
  Clone ID: 701098515H1
cagaagaaaatagtcgttcgagatggctcgtacgaagcaaactgctcgtaagtccacaggaggaaaggctcctaggaagcagcttgcaaccaaggctgcacgtaagtctgcaccaactactggtggtgtgaagaagccacatcgttaccgtcctggtaccgttgctcttcgtgagattaggaaataccagaagagtaccgagcttttgatcaggaagctccccttccagaggctggttcgtgaaattgctcaggacttcaagactgatctgcgtttccagag

SEQ ID NO: 25953 - DNA, 283 bp, Glycine max
  Clone ID: 701098516H1
accctttgagagttagaatggctgctgctattgaaatccccacaatagtgtttccaaactcctctgcccaacagaggatgccagtggttggaatgggatctgcccctgacttcacatgcaagaaagacacaaaggaggctatcattgaggccgtgaaacagggttacagacacttcgacactgctgctgcttatggctctgaacaggctctcggtgaagctctcaaggaagctatccatcttggcctcgtctcccgccaagacctctttgtcacttccaagct

SEQ ID NO: 25954 - DNA, 274 bp, Glycine max
  Clone ID: 701098517H1
gcatcactggcaagcaccccagaagagaaccgttcactgaggatgggtgattctgatgatgaggaaatgaatctatcgttgtttcctaagaagtttggaaactctactttcctcattgactcaattccagtggcagagttccaaggtcgtccgctagctgatcaccctgctgtgaaaaatggacgtccacctggtgctctcaccataccccgcgatcttcttgatgcatcaactgtcgcagaagccatcagtgtcatcgcctgttggtacgagg

SEQ ID NO: 25955 - DNA, 280 bp, Glycine max
  Clone ID: 701098518H1
atcgttttctacataatacaaacctttctaatttttgaagcttattatacccaatctcgatatgcagatcttcgtgaaaaccctaactggcaagacgatcaccttggaggtggagtcctctgacaccatcgacaacgtgaaggccaaaatccaagacaaggagggcattcctccggatcaacagcgtttaatcttcgccggaaaacagctcgaagacggcagaaccctcgccgactacaacatccaaaaggagtccacgctccacctcgtcctccggctc

SEQ ID NO: 25956 - DNA, 274 bp, Glycine max
  Clone ID: 701098519H1
cagacatctgtactagatagtatcttgcagggagaattgccctgtgaactggagaaatctaatcctacatacaatatattggcattattgcgggtgcttgacggtttgaaccaacttgcatctcgtttgagggcccaagtggttactgatagctttgctgagggcaaaattttggatttagatgagctaagtgttaccagcggtgctagggttcctacagaggaatttataagcagcaaacttactccaaaattagctaggcaaatacaagatg

SEQ ID NO: 25957 - DNA, 276 bp, Glycine max
  Clone ID: 701098520H1
cctcgagccgattcggctcaggtgtttctgcttacttcaacaagccacacactgagaggaaccacaagacttcgtattcgactactgttcaaggtgttgttgaccatagaggggttttcactgatgtgtgcattgggtggccaggttcaatgggtgatgatcaggttttggaaaaatcatcgctttttcatagggctaacaatggagggattaatctaagtggggtttgggttgttgggggttgtgggtaccctttgttggattgggttttggtgc

SEQ ID NO: 25958 - DNA, 274 bp, Glycine max
  Clone ID: 701098522H1
tttggagttggggtcccattgttcaatcacaatgttagaagtactcatacgatcaagtggagtttgtggataatacataaattattgcttgctgcagcatatggcttcattttatttgcaaatttctccaaatggagagagaagctgcctccaaggccatctttccacaactatgttgctgtaatgtttgtcttcagtgtgattaccctgtttgcttgtggactagcagcaattgacgctggacttggcaattggttgtatgatctcactgtgc

SEQ ID NO: 25959 - DNA, 254 bp, Glycine max
  Clone ID: 701098440H1
tctcagcccagtttcactggctcagtattgactctcctatggagaaagatacagtgagagagagaaaaaaatccctggcgtaggaggtattagcaacggagggggcaaggagtaccctggaagcctcactccttgtgtgacggtaacatgtatagttgcacccatgggtgggttaatcttcggtgacgatatcggaatttcaggtggggtgacatccatggatccgtttctgctcaagtttttcccgtcggtgt

SEQ ID NO: 25960 - DNA, 255 bp, Glycine max
  Clone ID: 701098442H1
atcgtttcttgcgcagatatcactgttttggcagcacgtgattcagttttcctgacaggaggtcccgattatgcagtgccactaggaagacgagatggcctgagcttcagcacatcaggaagaagtgatctccccaaacccttcaacaccaccggcgtgacccttgacgctttcgccgccaaaaactttgatgtcaccgacgttgtcgccttatccggcgcagacacctgtggtcgtgcccattgcggcacattc

SEQ ID NO: 25961 - DNA, 258 bp, Glycine max
  Clone ID: 701098449H1
agagagaagaagaaactgaatcgatcatcacttcacttcactaatacatcatggcagacgagacccagaacaagtatgagagctctgaggttgaggtccaggatcgtggtgtttttgactttctcggtaagaaaaaggatgaagaagacaagcctcatcctcaggaggaggtcatcgccaccgagtttcaaaaagtcactgtctcagaccaaggagagaagaagcacagcctcttagaaaagcttcaccgatctgaca

SEQ ID NO: 25962 - DNA, 55 bp, Glycine max
  Clone ID: 701098451H1
attggagggattgacgctccgtctcttcctcttctctttcgatccagccctcagg

SEQ ID NO: 25963 - DNA, 253 bp, Glycine max
  Clone ID: 701098455H1
tgtagagaagcactcttcgttcttcgactgtctacgatctgctttctctgaattgtgaaaatgtcgctcggagaaactgcttgttcagacgctggtttcatccttcatgaagatggaattagtgtaactgtatccttttctgtgtcctgaggttttgcgtgaacgaagagtgagtgtatgttcgaaataagttcttttctttgtttcgagttatgttttctagtgttagttgagatttgaatcaattgaagta

SEQ ID NO: 25964 - DNA, 258 bp, Glycine max
  Clone ID: 701098456H1
ctccccagttctcaaacctgacctagtattttcgtttctggcgcccattaattaagcacacaaggaccataagatacctagacctcaatatcacaagtcttatggaggcagagcgagacaagtacaagatgatcaactttgaagaaaccgagttacgactcggcctcccactcagtggaaacgagacgctcaaaaccacttgcagcactgggaagagggttttttcggatactgccgtggatttgaagcttaaccttt

SEQ ID NO: 25965 - DNA, 257 bp, Glycine max
  Clone ID: 701098457H1
ccagaggtcagagattttggagatcacctatttagtgacttaagacgcccctcaaaggcaggctggcgtacagcagcaatcatccatgcacgagagaagaactagagaaatagaaaatgaagatacctaccgctctgagcaggcaaacttgcatagtatacaggaactacttggtaaattgcatgcaactgcatctagtagttcaagaactagagcgttcaattcacttcttgaagaactgcgtgaggagagacaaa

SEQ ID NO: 25966 - DNA, 253 bp, Glycine max
  Clone ID: 701098458H1
tgatgatattgtgaagggttgcgtcgggtcgttggatacttcggctaagagtaccgggtcgggtgggaagaagcgtggacccgctccgtatagaagatttaacctggggaatacttcgccggttactgttcctactcttgtgagtatattggagcggcatttgaaggtgaaggcgaagaggaatattgtggacatgcctggaaacggtgacgttccttttactcacgcgaatattagttcggcccggagagag

SEQ ID NO: 25967 - DNA, 133 bp, Glycine max
  Clone ID: 701098460H1
gccgtggagtaccgcctcagctgccccgccaccgtcaaggagaagcccatcatccccaactccctcccggagaccgtctacgacatcaagtacttcacccgcgacgagcgccggaaccgccctcccatacgac

SEQ ID NO: 25968 - DNA, 257 bp, Glycine max
  Clone ID: 701098462H1
agcgcctcttgatagggtctcccagcctaaccaagccagatcccgttttcaattccttctcagtttccttttctctgaaaaaacatgttgagggttgcagctagaaggctctcttcttctctctcatcttcttctccgttgcggcgcaaactcggcgcttccgcttttctctctcgaaacgacgtcgtcgtcgatgaccgcagatctgctccttcctcccatccccttcttcccttcagaggttatgctactgaatc

SEQ ID NO: 25969 - DNA, 260 bp, Glycine max
  Clone ID: 701098464H1
cgcttttggaaagcttgttgtggatattgactacccaatgagtaaattggagatcttttccagtgaagagtacctcagctagaccttgagtttgctagagcttctgaattccgtttcttctcgtctttctaatcttggccaagctaggctttctctggtccatggtttgaccctggtggagaactcaccttctttggctagaaaacatctgaaagcgagtcaatttcaagaagggtactctttcaccaccaactttggta

SEQ ID NO: 25970 - DNA, 256 bp, Glycine max
  Clone ID: 701098465H1
ctcgagcgcggttgttgcaacctgatgatcgtaaagagcacgtaacagttcgtgacggggttgaacttattcaccgttacggaatccaagcttatccattcaggaacgagagcttggagcagctgcaaaaggaagacaaagtgaagcgtgataatcagactctcactaatttactagcaaaccagcacagagactatggtttgagtcacactcacacgggactcaaaaaggtacctgttgcttggctagtgggtaa

SEQ ID NO: 25971 - DNA, 253 bp, Glycine max
  Clone ID: 701098472H1
ataacaccttacagtgatcatgacaagagagccaagggtagtggatgagctccatggcctgcaagattgactagtcctcctcctagattagctgactttggctattcgagtgacatgtttgaaaaggacatggaactatggcaaaggagagttgagaagtactgggatctcttgagttcaaaaatcacagcaaacacattgaggaatattatggatatgaaagcaaacatgggttcatttgcagctgctctta

SEQ ID NO: 25972 - DNA, 250 bp, Glycine max
  Clone ID: 701098473H1
ctctctgcttgcttcttgttgttgtaactaaggaacaagagattgcttcttcttcccttttgttttcaaatttcaatttttcatcgggttctctgaaatggagagagatttcatgggtctcaactcaaaagaacctcttgctgtggtgaaggaggagatgcacgtttatggcttcgaagactctggcttcacaaagggtcggattgcacagtggccattctcgaacaaagtatctgcccttccacacaac

SEQ ID NO: 25973 - DNA, 252 bp, Glycine max
  Clone ID: 701098474H1
atggtctaaagggaaatggttgttcggattgcttgactcattgcttctgcgagccctgcgccctctgtcaagaagatcgtgagcttcaacaccgtggatttgacatgattattgggtggcatggaaatgtcgagcaacgaagtcggggagtagccatgactgctagaacagctccatcagtcgaaaatggcatgagccgttgaatagtatgcagttctgtaactaagacaatgtgtctacgatgcttgtgtt

SEQ ID NO: 25974 - DNA, 249 bp, Glycine max
  Clone ID: 701098475H1
gttggttgcggttataagtggaagaggagagggaagatgatgatgatgacaatggaggggatgatggacaagggggtgttggatcatgtgataagaacgcttctggaagggaaaggagggaaacaggtgcaactctctgagtcggagatccgtcaactctgcggcaacgccagacaaatcttcctctctcagccaattcttctcgacctccgtgctcccatccgcatctgcggtgatatacatggtcag

SEQ ID NO: 25975 - DNA, 255 bp, Glycine max
  Clone ID: 701098476H1
ccgccagctccaagacctgttgagcattacaattcagcgcgggcaccgtcatttccaccacctagagctggcgatgaagggcctttgccacctgtcatcggagtctcatatgcatctcctcctcgagcagccttttattgattcttttgagaacttttctcctctaacccttcccctctagccgagcaaagacgaaaaaagaaaaacacccattcaagttcagttcatacttggattatgattggtggccatttc

SEQ ID NO: 25976 - DNA, 255 bp, Glycine max
  Clone ID: 701098478H1
cagcatcacatttttccaatatttttagtttttgaagttgataggttgtatcttggttacagagttttgttccagcagagagagagagagagagagaggggggggagggatatgatctgacttttagttttgaggatattgaggtgatatagggtttgtaagctgtaagatgaaaatcgatttcaattgtgttgcctcaggcagcgcatcagttaaattttgattgagacaataaaaaaaaaaaaaagggggggg

SEQ ID NO: 25977 - DNA, 255 bp, Glycine max
  Clone ID: 701098479H1
cgcatcttgttcctccgctcaacaactataataagatctttctctctccgaagagatcacactatggccacctcaagcgccaaatcagtccatgatttcaccgttaaagatgccaagggaaatgatattaatcttggtgactagaaaggaaaggtccttatcattgtcaatgttgcctcacaatgtggcttgactaattcaaattacactgagctcagtcagttgtatgagaaatacaaacagaaaggtctggaa

SEQ ID NO: 25978 - DNA, 254 bp, Glycine max
  Clone ID: 701098481H1
aaacactcttcttcatattcttcttcttcttcttgttcttgttctatctgtgacgagcatcatggcctcgagagcagtgctattgttggctatgtgtgtgcttccggccatggttgtcgccattcgcccagcaaagaaccctttttgcgtgaagggtcgcgtctactgtgacccttgccgtgctggttttgagacctcagcaagcagctagattgccggtgctgagattatgttgcaatgcaagagcagggtta

SEQ ID NO: 25979 - DNA, 218 bp, Glycine max
  Clone ID: 701098482H1
ctgtatggcctggaaaaatattgggcatttcacgactatcgcaaggtccggggccaaaaagaagcattgaataaagaccctgaactggacaggttgcttcgagaagagtatcgtagtttagaggatttccgtgccaaagagaagaatgtggtaaaagagtacttcaattaagttgagtgatatggccaaatggtaaatacatatggcagagttttgat

SEQ ID NO: 25980 - DNA, 89 bp, Glycine max
  Clone ID: 701098483H1
cacaatccctctctctctccgacgtacatttccatctttttagggtttcatttcatggactccgattcccggatttccagacaacatac

SEQ ID NO: 25981 - DNA, 253 bp, Glycine max
  Clone ID: 701098485H1
cccggatagcggtgataaatatgcacgccccgttcttggtggttcagccttaccttaccctcgcagaggaagaaccggaagaggaaaaactagaaaagatcccaacagtgagaagccgagcgattttctttaccttccaagagatgaagcatttggtcacttgaagtcatcagattttctcgcttactggaatcaaagctgtatcccaagatgtcttgcctgtcttgactgatgcattcgatggaaatatttt

SEQ ID NO: 25982 - DNA, 251 bp, Glycine max
  Clone ID: 701098486H1
ccactcaacatttgacactcttttcttcttctcgttgttgcttcggtgttgaatcatggatcagaaactcgatttcagtgctccgcattccatgggaaccactatcatcggcgttacttacaacggcggtgtcgttctcggagccgactctcgaaccagcactggagtgtatgttgccaaccgagcatcggacaaaatcacacagctcactgataatgtttacgtgtgtcgctctggatcggctgctgatt

SEQ ID NO: 25983 - DNA, 249 bp, Glycine max
  Clone ID: 701098438H1
tgcgtctttggaattgaggttctgggattttgctatatatgaattgaagtggagatgatattggtgtagtgggcttttcaactggtttggtgagatgaagggtgttctttccatcagcttcttgttttgttgcttgctgctagttttggattcttcagtgtcacttcctcgatgcgttgattcaagggcaccctttaccttgaagaagacacttgggttttgtcctgagaatggaagcacgtgttgcaa

SEQ ID NO: 25984 - DNA, 256 bp, Glycine max
  Clone ID: 701098392H1
ccagctagtttccatggaacgtttggtgagttctgggatcaacacggttcgtgtttttggcattacaaaacaccaatctcgttttcttccttcatcaactctgcatctgaggaataatagtgtgtgtggatttggaattggggttgagaagaagaagaagaaacagtgtttcgttgtcgctgcttctgttggtggctccaaagtggtccattttgagaacacactcccttccaaagaggttcttgagctttggaga

SEQ ID NO: 25985 - DNA, 260 bp, Glycine max
  Clone ID: 701098394H1
acgatacgtaataagttctatcattgaggaagtttcctgtgcatcgtctccgaaaatgaacgacgcagatgtctcaaagcaaatccagcagatggtgcagttcatccgccaggaagctgaggaaaaggccaacgagatctctgtctccgccgaagaggaattcaatatcgagaagctgcagttggtcgaagccgacaagaagaagatcaggcaagaatacgaacgcaaagagcgccaagttgaaattcgcaagaagattg

SEQ ID NO: 25986 - DNA, 261 bp, Glycine max
  Clone ID: 701098395H1
ctcgccaccaaacaccctctaaatccattccctacgcaggttcagggcgtgactccttggggagcaaggatgagaatatggggattactgaaagcactagtagtgttaatggaggaagctgtagtagtcatagcagcaagaacattgtgtttcctagcgtggaagtgcggaacctgaaggagttcagttttgcgaatctgaaagcagccaccaagagtttcaaatcggatgcattgcttggagaaggaggtttcggaaaag

SEQ ID NO: 25987 - DNA, 239 bp, Glycine max
  Clone ID: 701098396H1
cacattctcatctctaaccactaccgttactatggaacctcgttgccttccattggtcttctctctcaatctgatcctgatgacagctcatgctgccatacctccagaagtttactgggaaaggatgcttccaaataccccaatgcccaaagcaatcatagactttctaaaccttgatcaacttcctctttggtatggtgctaaggaaacccaatctacagatcatatattcctgtatg

SEQ ID NO: 25988 - DNA, 262 bp, Glycine max
  Clone ID: 701098401H1
ctttcgaatagattatcctaagtctttgggaatagtgctgcaatggcttcaagtcaggaggaggtgacccttttgggagctactggaagcccatttgtgtgcagggttcatattgccctcaagttgaagggagttcaatacaaatatgtcgaagaaaatttgaggaacaagagtgaactgcttctcaaatccaacccagttcacaagaaggttccagtgtttattcacaatgagaagcccatagcagagtctcttgtgattg

SEQ ID NO: 25989 - DNA, 259 bp, Glycine max
  Clone ID: 701098403H1
cccaaatctctcttatctggttaaccccaatgtcatatgtcatgcacatgttttttattgaaattttgatccaaaatatcctcatcttcttccttggaacactttcatgtgttcttgctttcaataataaattgaagaacataaaaaagacctcaagacaacttcaaaaatttcataaaaaaattctttcatgatctcttcaaaacaactaaacaagcacaaattgtagaaacacgaaggaatttgtacattatttcat

SEQ ID NO: 25990 - DNA, 258 bp, Glycine max
  Clone ID: 701098404H1
attcggaagagcttcaaagtcatgatttagctgatgctgtgaagctaatgaaagacaagcgcaggtttaaggatctcctgataatggtggacacctgttaagcctctactctgttctcccagcttcattcaccaggtgttttggcaattggaagtagtaagaaaggagaaaattcatattcacatcatttggactcagatgttggcgtttcagttgttgatcgttttacattttacactcttgctttctttgagaggc

SEQ ID NO: 25991 - DNA, 256 bp, Glycine max
  Clone ID: 701098406H1
ctcgagccgcaagtaacaactgcatgcttggactctcttgaagagcttcctgccctgtcaaacttgaatcttagtagatgtaatctttctaacgatggatgtgaaaagttttcacgactggaaaatttgaaagtattaaacttgggatttaatgacataacagatgcatgtttagcacacttgaaaggattgacaaagttgaagagcttgaacctggattcatgtaggattgaagatgaagggttggtccacctgg

SEQ ID NO: 25992 - DNA, 255 bp, Glycine max
  Clone ID: 701098407H1
cagaatttttctcaaaagtcgggagccgggaggtgggaaggttgatcaaacgctacgcagcggacgtgacttggtagggcatggcacccacacactgtcaagagctggtggtaattttgttcctggtgcaaatgttgaaggtaacggcaatggtactgctaagggaggatcccctagggctcgcgttgttgcctacaaagcatgctggaataaactggatgaaggagggtgctatgatgcagatattctagaagc

SEQ ID NO: 25993 - DNA, 257 bp, Glycine max
  Clone ID: 701098408H1
atccctcactcttgttcttcagtctcctcctattatccgccaccgtagccgccgccgaacggatcgacgatgaagacgaccttctgatccgtcaagtggtgccggatgcggaggaccaccacctgctcaacgcggagcaccacttctccgccttcaagacaaagttcggcaagacctacgccacgcaggaggagcacgaccaccgcttccgtatcttcaagaacaacttgctccgcgccaagtcacaccagaaattg

SEQ ID NO: 25994 - DNA, 255 bp, Glycine max
  Clone ID: 701098410H1
ccgtggtgtaactgcgatgtttgcaagagctacttgacggtgagttggctgaacaagtttccaaatctctgcgactggtacactcatcttctgcgcaaatccccaaccggcaccatccacgtgcacgtgctggagaacaccataacctcgaaccccgtcaacgtggagtacattctcaagacgaatttccaaaactaccccaaggggaaaccgttctccgtcatcctcggcgatcttcttggaagaggaatcttc

SEQ ID NO: 25995 - DNA, 258 bp, Glycine max
  Clone ID: 701098414H1
ctgacttcttctgggagtggttgacaccaggtggaggtggaaagccatccggggagcttctagaactgattgacagagactttgcgctcagtggaaaaattccttgatgagtgtaaggctgctgctgcaacacaatttggttcaggatgggctttgcttgcatagagagcaagcaaatttgatggggaaaatgcagcaaatcctcctgtcaccagatgaggacaacaagctagtggtgctcaagagtcccaatgctgt

SEQ ID NO: 25996 - DNA, 258 bp, Glycine max
  Clone ID: 701098415H1
cttgatgacagtggatttgatgaggacatactgtttgatccacagaattctgaaacttttggtgatcgaacttttggtggtgtgtttggttcggtcgttaagaggcctggtgaaataagtggtggaaaaggaaatgatggagctcgaacattggcaaattcttcctccatggatcagacacaatcatgtcaatcaaatacctgtgtggatttaagccgctctggttctgatgatcatgcgaacagtgtagcatcggaa

SEQ ID NO: 25997 - DNA, 279 bp, Glycine max
  Clone ID: 701098416H1
tcggaatgctgctcgaggcccttcactcttcacttctcattctctctctgactagcttcctttctcttccgctttctagtttgtctctggcactctcttctctttcgtttggctctgcctttgaatttgccagcgaccaagcatcgagaacctcggaagagtaaaacgtgtcaaacgtaatcggcagtagcatgtcgcccaacaacgtggaatctgggacaacggatgatacagagtgtagtaggacaacaagaacgtcatagtccactacatgatatt

SEQ ID NO: 25998 - DNA, 257 bp, Glycine max
  Clone ID: 701098422H1
atcccaataactttgagaaagctagctagagagctatagctaactttgaaaatttgcccaatatacatgttctactttgcctattgcaacatatcctatagttagcttcttagttcttacattagagagatggaagttgacttagttcttgctctccccagtcaaaattccgttgaggaattcaagcttaacaagtcgaaacagagagtgagtttacagttatggagagccagttgcggttcagaaagcgaaaaacg

SEQ ID NO: 25999 - DNA, 255 bp, Glycine max
  Clone ID: 701098423H1
ctttcaagtttcaaacaactgcacccaaaagctgttgcatgcgtcctcctgggggcatccttgcacctggtgagagtatcatagcaacagtgttcaagtttgtagagcaaccagaaaataatgaaaagcctgaaaaaagtggactcaaatttaaaatcatgagcttgaaggtgaaaggatcaattgattacgtccctgaactgtttgatgagcagaaggaccaagtagcagtggagcagattttgcgagttgttt

SEQ ID NO: 26000 - DNA, 258 bp, Glycine max
  Clone ID: 701098424H1
ctcgagccgctggatttaggattgataaattaagccatggtcatggaaacagcacaactgctaggtcttgcaaaaggggaatgagaaggggatcctaaggactgaaatcaattgggcgctcgcttgggttgggagtatctagggctgtgttcccagaagatctgaaagtgtcagaaaagaagatatgtgatcctcaagacaagtttctgctcgtatggaataaactttgtgttatctcatgcattttggccggctcta

SEQ ID NO: 26001 - DNA, 257 bp, Glycine max
  Clone ID: 701098425H1
caaaatttgggcaagaagagtgatttgcttctcaaatagaaccctgttcacaagaaggttccagtgtttgttcacaatgagcagcccatagcagagtctcttacgattgttgaatacattgatgagacatggaagaagaaccccatcttaccttctgatccttaccaaagagccttggctcgtttctggtccaaattcattgatgataagattgtgggtgctgtatcgaaatctgttttcacggttgatgagaaaga

SEQ ID NO: 26002 - DNA, 260 bp, Glycine max
  Clone ID: 701098429H1
cccgatgctgcgaggtccacaactcaatccgcttttctttcaaatcattcggtttctgagatcaaaatgtccccacatccaagcaataatcgcctcaatgagattagtataaatcatagagtttcctttgagttatcagcccaaaaagtgctaaaatctctggaaaacaagccagcagcatcagtgtggactaatgtggtgtcaaaattgcaaaatgatgctccaacaactgacaaagaagaaaaatccgtagaagctgt

SEQ ID NO: 26003 - DNA, 261 bp, Glycine max
  Clone ID: 701098431H1
cacggcacctgatgagtgtaaggcgttttatgcacatcctgttcattgtagtgcctttcgttgtgcatcgccgccgccacgacccccttcacctccacctccccctccgcctcggcgctggagcaccgcgagcgccagcaggaggatcttagcaggactatccctgaggagccatgagacacataagtttgtaatagttaatggagtttttgctgatgagtttgtttctttattttttggggatgtgaagattagcttggt

SEQ ID NO: 26004 - DNA, 265 bp, Glycine max
  Clone ID: 701098432H1
ctcgagatctggtgagatccttggtaggggaacaaagataactttgtttctcaaggaagagcaacttgagtatcttgaggaacgccgtctgaaggatttgataaagaagcattctgaattcattagctatccaatgtctctttggattgagaagaccactgaaaaggagatttctgatgatgaggacgaggaagagaagaaggatgaggagggtaaagttgaagatgtggatgaagataaagagtaggaggagaagaataagttg

SEQ ID NO: 26005 - DNA, 259 bp, Glycine max
  Clone ID: 701098433H1
tgaccaccgacgattccatttctacgaactcagacccttcaatcccaactcagaaaaaaaaatcatgaagctgaagacatatgcgggtcttagtatcattgcaactctggctattatatatcatgcgtttaacagtaggggccagttttatccggcaatggtgtatctgtcaacttccaagatcagtttggtgcttcttctcaacatgggtttcgtctttatgtgtattctatggcaattaaccaagaaggtgttcctg

SEQ ID NO: 26006 - DNA, 257 bp, Glycine max
  Clone ID: 701098434H1
cgttttggagccctacacaaaggaggttgttcgtgttgatgggaagtttttggaatcagctactacatatcatcgccaggtccaagcttctgtccaagagacactgaaaaagcatgagcttactagacctcttgctactaaagagttggaatggtttgcggcctctccccttctggcttgacctattgttttaatggctagagtgttttcagctgttttctgtagcaaaaaagtgagtaaacctgctcgaaatggaa

SEQ ID NO: 26007 - DNA, 258 bp, Glycine max
  unsure at all n locations
  Clone ID: 701098391H1
ctttccttctctctgccctttcattacttctaccaagctactacatctttaacttcctctttctacatttctctcanaacaatcatggcttctcttcattccattacattttcaacaaaaactgtcctttatgtatttgtattggcctcttccatcgcagcctctgctggcaacttctaccaggattttgacgtaacttggggagatggtcgtgccaagatactcaacaacggcgatcttctcactctttcccttgat

SEQ ID NO: 26008 - DNA, 265 bp, Glycine max
  Clone ID: 701098340H1
acttaattgccttaaggaacgttcgagaccacagaggtttctctagtcttcttctgtggagagcttgttttctcttgttcattcatctcacttccaattaaggaacaagctttccaccaatttgaatcaccaatggctcgctctttctccaacctcaaggttctctctgctcttgtcgccgacggattctccaacactctcaccaggcgtgggtacgcagtagcgacacaaagcgcaccaagaggaggagcagcctccatcagcg

SEQ ID NO: 26009 - DNA, 265 bp, Glycine max
  Clone ID: 701098341H1
caaatggtttaactttgactcgatctctaccaccacaacatcacgatatgttgttacaatcataatcgcaatttgaaaccttgggctagctaaaactattttaatataaagtattaatggtcactgctacatgagcgtctatgattaaataaaaagtagggagtttgaacccatgtaataccatgttgtgaggttacccctctttgtgtgtgctttaaattttcacatatagtttgatttgtgtccggtgtggtctctgtttctt

SEQ ID NO: 26010 - DNA, 263 bp, Glycine max
  Clone ID: 701098342H1
cgataatataatgaaagttgagcattcgttgagtgaatcagttgttcctggatgcaaggcgtctctgccttggttgcgtttagatgaaggagaacaggatgaacttgctttgtttctttcaggaatgccagcagctaacaacaggaacattgaagatccacggttaagtgaaaacgtttcagccagtgattgtctgaaggattttcatgtttcatctgtgtggggcgactcaaaggaggatatatcacatgggcatcgtcggg

SEQ ID NO: 26011 - DNA, 77 bp, Glycine max
  Clone ID: 701098346H1
ataaatccttgctttctctgttgggtctgtttcatttcatcttctggttttggatcattcagcgccacacaacatac

SEQ ID NO: 26012 - DNA, 266 bp, Glycine max
  Clone ID: 701098347H1
ccgagccagcgagcagtttcaaagaaaggatttgggattgggaaggcgagggattgcgctgcgtctcttcctcttctctttcgattcatccctcattcataatcttccaatccaacaacctcaccctcacactcacacatacacacatctgaacgcgtatcgtccctcccatggcttcaaagcgcatcctcaaggagctcaaggacttgcagaaagacccaccaacttcttgcagcgctggtccagtagctgaggacatgttccat

SEQ ID NO: 26013 - DNA, 268 bp, Glycine max
  Clone ID: 701098348H1
caacatttgaagaattgaacctgccattattgtaagtaagaattgggaaaggaaggaaggagatgaatctccctatcatagatctgtcctcacctgatcctctttccactgccatttccatccgtcaggcgtgcattgagtatggtttcttttaccttgtgaaccatggcgtggagaatgacttggtcaaagcctttgatgagagtaagaggttcttctcacttccaccaggagagaaaatgaagttggcccgcaaggaatttagagg

SEQ ID NO: 26014 - DNA, 265 bp, Glycine max
  Clone ID: 701098350H1
ctagccgcagcacgaggagcagcctcaggaggagaaggatgtctcacaggaagttcgagcacccaaggcacggttcactgggatttcttcccaggaagcgtgctgctcgtcacaggggaaaagtgaaggcattccccaaggatgacccatccaaggcacccaagctcactgcattcttgggttacaaggccggtatgactcacattgttagagaggtcgacaagccaggatcaaagcttcacaagaaggaaacttgtgagcctgt

SEQ ID NO: 26015 - DNA, 262 bp, Glycine max
  Clone ID: 701098355H1
cggctcgaggtcgttctgaacggaaaagcactggcgcactaccctgaggctcatcttctcttctcttctctgtcgtgagtcaccatggtgagggttagtgtgctgaacgatgctctgaagagcatgtacaatgctgagaaaaggggaaagcgccaactcatgattaggccatcctccaaagtcattatcaaattccttttggtgatgcaaaagcacggatacatcggagagtttgagtatgttgatgaccacagggctggta

SEQ ID NO: 26016 - DNA, 262 bp, Glycine max
  Clone ID: 701098357H1
agtggtgacattgatcataattataagaactttaagttcatctttcaagccattgatgataatgatcatggcggtactattatcaaatggaccgttgaatacgagaggcttcgtgaggaggttgatcctccatatggccacattgaatacctgcacaaatgcactaaagatattgatggtcatcttctcaaagcatagctagctctaaaagttatgcactaaaaaataatgggcttgacctttggataagtgcttatatgta

SEQ ID NO: 26017 - DNA, 129 bp, Glycine max
  Clone ID: 701098361H1
ctcttttctccggcagcaccaaaaccagtcaacacttgaaaacaatatccattgttaccagaataagcagagatcagaacaggcttgacgtcattatactcagttccctctttccctatcaaaagcctt

SEQ ID NO: 26018 - DNA, 265 bp, Glycine max
  Clone ID: 701098362H1
cttctccctctctctgtttttgtcatgcctgcaacagcagtgaaaacagcaccagcgaaggcggctgccaagaaggcagaaaccacaaaagctcaaaaaactgagaaaaagcctgcacctgccgccaaacaaccagccaaacctgctgctgtaaaaaaaattcccaccaaggttgcgaaaccttccaaggcaatctcaaaatccaataaacaaaaaggaaaagctggactgaaggccaagaagaaacctttgaaattcaccatcg

SEQ ID NO: 26019 - DNA, 266 bp, Glycine max
  Clone ID: 701098364H1
gctgaggatggaggcttgccttcatcacctgttgcttctcagtctgcccagggggttaatgggcttccagaagtcaagaccaatgaagtgccaaaagaaaacactctggagaagccagaaaagcctgagagcacttcttcacctagagcttcacattcagtaatttcaggtactgttaagaaacctatcggtgctaaaaaagcagtgaagagtggggggcttggtgctcgtaaactcactaaaaagccaagtgagtctctctatga

SEQ ID NO: 26020 - DNA, 262 bp, Glycine max
  Clone ID: 701098365H1
ccaagacactcgccggccccggggtaattcagtgagccaccggcgagtttgggtgaaggagcgttccgtcgcgtggtgggaggagtgtaacacacccgaatttccggaacaagagctcacaaaggcgttcagaatgggaaggctcacttttgaagcgatatgccaggagctgaattcggtgatagcgaaggaagacacgacgctgagaaccgccattccggtgaaacaaagggtggcggtttgtctgtggcggttggccacc

SEQ ID NO: 26021 - DNA, 260 bp, Glycine max
  Clone ID: 701098369H1
ctatattccattctctctgtctatttccctacctctcccttcaagatgcagagcttcgccaataccctcaccggcaagaccatcagcctggaggtggaaagctctgacaccatcgacaacgtcaaggccaagatccaggacaaggaaggaatccccccggaccagcaacgtctcattttcgccggaaagcaactttaggacggccgtacccttgctgactacaacattcagaaggagtgtactcttcacctcgtcctccg

SEQ ID NO: 26022 - DNA, 257 bp, Glycine max
  Clone ID: 701098371H1
tgatcattcaccacatttcatttacacaaatcatcaatggcctctcttgcatcctcaagtgttctattacacctcttactcataatttccgcgctccatttgggcccagagcaagaattctgagtgaaaaggaccaacaacaacaattgcagttccaataccacaaaggccctcttctcagtggcaaaatctccgtcaatctcatctggtacggtaacttcaagccttcccagcgagccatcatctccgatttcatc

SEQ ID NO: 26023 - DNA, 113 bp, Glycine max
  Clone ID: 701098373H1
ttaactttgatatggtggcccactattaatgttgaatgtccagttgcggggacacgcgatactcgtgtgataaactctggatgcagcacaatcaacgcttccaacccgggtag

SEQ ID NO: 26024 - DNA, 240 bp, Glycine max
  Clone ID: 701098374H1
ctagaaagttagaaaacatggcagcggtcgccggagcatcctcgtccgtgattaaggtggctgcactttccggatctttaaggaaaggctcttacaacagagccctcattcgttctgctattgagctaagccaaggtagagttgaaggccttcaaatcgagtacgttgatatttcgcctttgccccttctcaacaccgatcttgaggtgaatgggacctaccccccacaagttgaagcct

SEQ ID NO: 26025 - DNA, 260 bp, Glycine max
  Clone ID: 701098378H1
cccgctcgagcggctcgagcctttttgtagatcacttctacaatgaaaagtggattattgatgacactaaatgcttcacgctacattttaactctaaccctcgtctgcaaactaagtgccaacaatttgttgacagttagccacctcttcatggaatctgttccagtctctctgaagtgttattggttatagtgttgtaattctaataatggaaagatataacattttgagagagcttggggatggttcttgcggtcatg

SEQ ID NO: 26026 - DNA, 262 bp, Glycine max
  Clone ID: 701098379H1
ctcgagccgttcttagacagaatcaagcaggcatatgaaagaacccctaatctggcaaaccttcttgtggatccagagtttgcaaaggaaataattgattaccaatctgcctggaggagagttgtttgccttgctatcaattctggtattagcactccaggtatgtctgctagtcttgcttattttgacacttacagaagggaaaggttgccagctaatttggtgcaagctcaacgagactactttggtgctcatacatatg

SEQ ID NO: 26027 - DNA, 259 bp, Glycine max
  Clone ID: 701098381H1
gttgctgctcatcctccgtaacctccgagctctgcaccgaagaacgaagccatggggaagacacatggaatgggatctgctcgcaagctcaagtcccaccgcaggaggcaaaggtgggctgacaagtcatacaagaaatcacatcttggaaatgaatggaagaaaccttttgctggttcatcccatgccaagggaattgtccttgaaaagataggtattgaggctaagcagcccaactctgccattcgtaagtgtgcca

SEQ ID NO: 26028 - DNA, 257 bp, Glycine max
  Clone ID: 701098382H1
aagcgtctcaagccatctccagttgaatcagcagactccgcgtctgagcccacgcgcacggtgctgctcgttgaccatcaggaagccggcgtgcgtctggtccacactctcctggcgtccgcggaggccgtccagcaggagaatctgaagctggccgacgcgctcgtcaagcacgtgggcatactcgcggcttctcaagccggcgccatgaggaaggtggcttcctacttcgccacaacactcgcgcgccgtatcta

SEQ ID NO: 26029 - DNA, 259 bp, Glycine max
  unsure at all n locations
  Clone ID: 701098385H1
ttctcgctttcgttatttccactgtgtatagttgttcacctcttacgttannaactgtcgttcagacgaaggatggaggttcctttggcgtcgtccaccgtcgacggcggaatagggtgctgggaccttcacaccggcgcggagacgctccgctacaaatcttgcacctccccttctcacggactcatctccgtcggtgctcgcttcatcgcttcgtcgcagcttcgtgatgatcccgcagccactggctatgttctct

SEQ ID NO: 26030 - DNA, 257 bp, Glycine max
  Clone ID: 701098386H1
acttgatctccaatttactcgttgtggacccgcaaaagaggtattccattccagacatcatgaaggccccatggtttcaaattggcttcttgaggcccattgcgttttccatgaaggagtctgcgcttgaagataacattgatttcagcggggatgatgttcctagtcctggtagtgatgatggtaatagcagcagcaacaacgaggatggggagttgacgggggctaagcctgctcgtccgtcttacaacgctttt

SEQ ID NO: 26031 - DNA, 95 bp, Glycine max
  Clone ID: 701098387H1
gtcagaaaccaatttcttaggaaggatttctcacccaaacctggtcaagctattgggttactgttgtgacgatatcgagtttctccttgtgtacg

SEQ ID NO: 26032 - DNA, 263 bp, Glycine max
  Clone ID: 701098339H1
cctcgagtcgattgcggctcgtatcacaagtgcaaattgaactaatcgacctagcaaacttctcattaatcgctatattgctcgtgatgaattgcaattgtgaataataatgactggctattcactacgttataacgtgttttgcttctctatgttgtcttctctacttattgccatagcctctgctgatctatcttcagatttcgatgcatcaacatgccccaatgccctctctatcataaaatctgcagtgatgagggcag

SEQ ID NO: 26033 - DNA, 259 bp, Glycine max
  Clone ID: 701098388H1
ctcgagccgcttgtcggagtcaggcgctctaacccgagcagctcaggttgcttctgatatgcgtactcacagggataggcagtaaacaaagcattgacatgattaaacactatcttttagatatgtctgcttctgctaaatagcttttgaaacttcagttagcaatattattatacttttacaatacataaatcctgtttggataattttttggataaacacttatagaagtaaggtaaaatgaattgagcttctctcg

SEQ ID NO: 26034 - DNA, 267 bp, Glycine max
  Clone ID: 701098301H1
ctcccttagtcaaagggattcatcgttcttcttcccaggttatctagaaaagcaaaatggtgaagatttgctgcattggtgctggatatgtggggggtcctactatggcagtcattgcacttaagtgcccatccattgaagtcgctgttgttgatatctctaaatcccgcattgcagcctggaacagcgaccagcttcctatctatgaacctggccttgatggtgttgtgaagcaatgccgtggcaagaacctcttcttcagcactg

SEQ ID NO: 26035 - DNA, 267 bp, Glycine max
  Clone ID: 701098303H1
gatccgagaagaaactgagagaaacaattaacgtcgtaaacgacgtcgcaaaagagatgataaagcagagaagagaaatggggttcaagacgcggaacgaccttctctcgcggttcatgggatcaatagacgacgacgtttatttaagagacattgtggtgagttttctattagcgggtcgtgacaccatcgctgccgggttaacgggcttttttatgttgttatcgaaaagcccggaggtggaggagttgattagggaggaggtgg

SEQ ID NO: 26036 - DNA, 265 bp, Glycine max
  Clone ID: 701098304H1
attatgatgtaatccttctggtggggctaggaattggtgccacccctttgataagcatactcaaagacgtgctaaacaacatcaagcaacataaagatgtagaagaaggagaggtggaaaaggacaagagaaaaccttttgccactaagcgagcttatttctactgggttacccgtgaggaaggttcctttgaatggtttaaaggggtgatgaatgaggtggaagagaatgacaaggaaggagttattgaacttcacaactattg

SEQ ID NO: 26037 - DNA, 263 bp, Glycine max
  Clone ID: 701098305H1
gtagcaccttatgaacgtcctgctctgagcaaggcttacctttttccagagtcccctgctagacctcctgggttccatgtctgtgttggaagtggaggggaaaggttgcttcctgagtggtacacagagcaagggatagagttaatacttagcacagaaatagtaaaggtggaccttgcggcaaaatctctgatcagtgcgggaggagaaacattcagttatcagattttgattgttgcaactggctcaacagttataaggct

SEQ ID NO: 26038 - DNA, 265 bp, Glycine max
  Clone ID: 701098307H1
cgcgaggtcacgaggagcactagctagtttcacaatttccaaatggctaggggattgaagaagcatctcaagaggctcaatgctcctaagcattggatgcttgacaaactgggtggtgcatttgcgcccaaaccctcatctggaccacacaaatctagggactgccttcccctcatactcatcctacgaaaccggctaaagtatgctctgacttaccgtgcagtcatcgctattctgatgcagagacatgttcttgttgatggaa

SEQ ID NO: 26039 - DNA, 266 bp, Glycine max
  Clone ID: 701098309H1
gtcaacaacgattcctttcggttttctgtttctctggattcattttcatttttacggctaccagaatgtccagctcatcggaatattcggcattttccggcccccgcccggccaagtcgccggccgagaagtccactttctctcagacttgtagtctattgagccaatacatcaaggaaaaaggtgccttcggagaccttaccctcgggatgactcgcacccccgatacttacggttcccctgagacatcgtgtcactctgcaaca

SEQ ID NO: 26040 - DNA, 267 bp, Glycine max
  Clone ID: 701098310H1
cccctctcttcattccaattttggcaccacaccatgccaaccctcaaccatgtcctcacattcacattcttccttctcctctcttgccattgccacctcctcaatggccaagaggacacctcatttggccgtgccatagacagaaaattgttaggcctaaagagaaaagaaaagctcagccacttcaaattttattggcatgacatagtgagtggccgcaaccccacttcggtggcggttgctccgccaccgccgaaggtgaacacg

SEQ ID NO: 26041 - DNA, 263 bp, Glycine max
  Clone ID: 701098312H1
cctgtgttcactctgcttctcttgcggctagagtttcagcgcagtttcttctagacttaatgaacatgggtaaggctaaggttcacatcagtattgtggtcattggccatgtcgactctgggaaatccactatcactggtgacctgatttacaagcttcgaggcattgacaagcgtgttattgagaggtgtgagaaggaagctgctgagatgaacaagaggtctttcaagcatgcctgggtgctggacaaacttaaggctgag

SEQ ID NO: 26042 - DNA, 267 bp, Glycine max
  Clone ID: 701098314H1
actcgagccgctcgagccgattcggctcgaggagacagaaagcgcagtgaaaaaagcttacgttgaaaaccatgagaaaatattcgcaacaagaactcgtgttggggcgaggagggtcaacagctgtgactgcaatacttattgatggtcagaagcttgtagtagcaaatgttggtgactcaagagctattatctgtgagaatggaaaggcaagacaactatcagtggatcatgaaccaagcaaggaaaaaaaatcgattgagaggc

SEQ ID NO: 26043 - DNA, 266 bp, Glycine max
  Clone ID: 701098315H1
gttcctaacattccagtagtctaattgtaagaatttacggataactttggtcaagactctctgattggagagggatcctatggaagagtatattatggtgttcttaaaagtgggcaggcttgcagtaatcacgaatctggatgccagtaaacagcctcatgaggaatttctagcacaggtttcaatggtatcacggctgaagcatgaaaattttgttcagttgctttgatatggcattgatggaagctcccgtattcttgcttatc

SEQ ID NO: 26044 - DNA, 270 bp, Glycine max
  Clone ID: 701098316H1
gcaatagaccactctaatctcccttgacatctatcaagatgagtcattatagagagaatatgctgctctatcaatatgtttagttgcttttcatgcataggtgtattcaggacttcgaaaatagcctttcagctgtagaaaggagaaaaaatatctaaaagaattgatatcaacgttccctattacaaagttggagtgtcaaagcaattgtcagctggatattgtttgagtgtttagggaatgaaaatgtctcaattgtaaccgaaaaag

SEQ ID NO: 26045 - DNA, 268 bp, Glycine max
  unsure at all n locations
  Clone ID: 701098317H1
tcatcatccatctcttgttgttgttgttgatctccgcctccctcctcaactcactattccacacaaactaatatacaatcattcanattcctctcactcagaatcacatcacaccaccgcacaaccctaaattcaatttttcgatcttgcccctcgcagccgttgtgaaatggggagcaggagggacgagagcgcccgccataaacagcaccaaactcttcgccgccctcggaagcctcaagaagaagaagcagaagcccgagaagga

SEQ ID NO: 26046 - DNA, 267 bp, Glycine max
  Clone ID: 701098318H1
gtggaaaaaccatgggagcgtgtcactgtggatggtcaacctcatgaacatggtttcaaacttgggtctgagaagcatacaacagaggcgatagtacaaaagtctggttcacttcagttgacttctggtattgaaggattgtcagtgttgaagacaacccagtctggttttgtgaatttcataagagacaagtacacagcacttcctgatacccgtgaaaggatggtagcaacagaagtaaccgcactgtggaggtattcgtatgaa

SEQ ID NO: 26047 - DNA, 251 bp, Glycine max
  Clone ID: 701098321H1
cttcgatcccttcactttgcaatttcatgtctaggctcatggaaccacttgttgtgggaagagtgataggagaagtggtcgacattttcagcccaagtggaaaaatgaatgtgacatattccaccaagcaagttgccaatggtcatgaggtaatgccttctactattatgggcaagccacgcggtgagatttgtggtgatgacatgaggactgcttataccttgatcatgactgacccagatgctccaagt

SEQ ID NO: 26048 - DNA, 263 bp, Glycine max
  Clone ID: 701098322H1
ctcgagcgataaacatatattgagaatggagggttgtgtgaagaagttgctatgcctacttgggtttgtggtgcttgtgagtactattggtggggtggagagtgctggtgaatgtgggaaatctacaacccctgataatgaggcttataagcttgcaccatgtgcctcagcagcacaagatgagaatgctagtgtttctcagagttgctgtgctcaggtgaagaaaattgggcagaaccctagttgcctctgtgcagttcttc

SEQ ID NO: 26049 - DNA, 92 bp, Glycine max
  Clone ID: 701098324H1
gcaagatatatcacaagatacggcattcagcggttatgtccgcttgggcctcatagctcttgtcattgttaggtcttccacacaacatacga

SEQ ID NO: 26050 - DNA, 265 bp, Glycine max
  Clone ID: 701098326H1
agcaccacttctctctctattattctctcctattcaaatgggaaacgcattgaagactccatgctttcaactcaacaccaattcatcatcatcatcaaaacccgtgaagctcatattttgggaatgaacatcgagatcccttaaaggtcaacacatagctggtgagatcatgtttgagttccctgaaatgatggtttgtcatgcagactctttcttcattggacaaccaatacctgttctctccatagatgataaactcatgccc

SEQ ID NO: 26051 - DNA, 262 bp, Glycine max
  unsure at all n locations
  Clone ID: 701098327H1
cgtttttcttggacaagatgatggcacccgcaaatatctttattatttttttgtagtaacagtcagcatttgtcttgacccgnattgcacctaacattttgtggactaggccaagcttagtaaactattcttattctttgttctagagagatcagggaatgtggaattcggttgaaatgagctagtatttggattggatcttggtgtaaagagaacaaaaaaaaaaaaggggaaaaggatttaggtgttgcagtaagtaaaa

SEQ ID NO: 26052 - DNA, 265 bp, Glycine max
  Clone ID: 701098330H1
aggagaggtgctgctccctggtggtcatggtcttatggtccgtggttacttgcctgttataaataccctagccaagggacttgatattctcttggggcacagggtcacaaaagtagttaggcgatataatggagtaaaggtaacagtggaaagtgggaaaacgttttttgctgatgctgctgttattgctgtcccacttggggtgctcaaggcaaagagaatattgtttaagccagagcttccagactggaaggaagctgccatt

SEQ ID NO: 26053 - DNA, 142 bp, Glycine max
  Clone ID: 701098332H1
gtaatgtcagaattcggttggatgaagaagaaggactagctagtggaagtggagtctctttagtggtgcggtcgagattctcggcggcgtagtcgtgcggatcgtcgtcgggaatgttatcttcggtaaggatgatccattc

SEQ ID NO: 26054 - DNA, 265 bp, Glycine max
  Clone ID: 701098333H1
cgcaccagtttcaccgcacgaatatcttgttgtttggagcgatccgagaaaaactctgtaaacatgttggtttaccaggacctccttacaggtgatgagcttctctctgactccttccgttacaaggaaattgagaatggaatgctgtgggaagttgaggggaagtgggttgttaaaggagcagttgatgtagacattggtgcaaacccttctgctgagggtggaggagaagatgagggagttgatgatgcagctgttaaggttg

SEQ ID NO: 26055 - DNA, 262 bp, Glycine max
  Clone ID: 701098337H1
cacggtgttcatattcatattggcgcttgttggtgtgttttatccatacaatcgaggggcactgtttactgcacttgttgtcatatatgcacttacttcagggattgctggatacactgcaacttcattctattgtcagttggaaggaacaaactgggttaggaatctgctgttgactggatgccttttctgtggacctctgtttctgactttctgctttctgaacactgttgcaattgcttacaaagctactgctgctctt

SEQ ID NO: 26056 - DNA, 278 bp, Glycine max
  Clone ID: 701098296H1
gttccttccttgtgatgtgtgtagggaagcgaagatgagaagagtagatggtgggcgaaacggcggcaacggggaagtcggttggtttgggtttgggatgtgacccagtggtgggatccttggcttgttcgaagaagagagaatacagagtcaccaatcgccttcaagagggaaagcgccctctatacgccgtcattttcaacttcatcgactcccgctacttcaacgttttcgccactgttggccgcaatagggttactgtttatcaatgtctcgaa

SEQ ID NO: 26057 - DNA, 268 bp, Glycine max
  Clone ID: 701098245H1
gagaggtgtccctgttgccactgttgcagttaataatgcaactaatgctggattgctggcagtgaggatgttgggtgttgccaatgataatcttctgtcaaggatgagtcaatatcaagaggcccaaaaggaaagcgtattgggcaaaggagataagttagaaaaacatggctggaaatcctacttaaacaatagttaattatccccattaatttggtgattatctcttaggctcatttctcatttttggtcaactacaaaattttga

SEQ ID NO: 26058 - DNA, 270 bp, Glycine max
  Clone ID: 701098248H1
aagaagaagaagaagaagaagaaaaaaagatgaacttgagatggatggcagcggtgttgccgctgggaatcatagctggaatgctctgcgtcatgggaaacgctcagtattacattcacagagctgcacatggcagacctaagcacatcggaaacgatatgtgggatgtggcgatggagcgaagggacaagaagcttatcgagcaagcctctgcctccaattaacatcgttgttttgccgatgtcatcgtgaagaacataaactgctcac

SEQ ID NO: 26059 - DNA, 257 bp, Glycine max
  Clone ID: 701098249H1
ctcgctccagcaacaaggctgcttctaagcctctctctcgtggatcagcaactgtggaatcaaaggggcaagctgagaagtgtgccaagagaaagaggaagaaccagtatcgtggaatccgtcagcgtccatggggaaagtgggctgctgagatccgtgacccaagaaagggggttcgtgtttggcttggaactttcagcactgctgaagaagctgcaagagcttatgatgctgaagcaaggaggatccggggcaag

SEQ ID NO: 26060 - DNA, 275 bp, Glycine max
  Clone ID: 701098250H1
atttccctacctctcccttcaagatgcagatcttcgtcaagacactcaccggcaagaccatcacccttgaggtggaaagctctcacaccatcgacaacgtcaaggccaagatccaggacaaggaaggaatccccccggaccagcaacgtctcattttcgccggaaagcaacttgaggacggccgtacccttgctgactacaacattcagaaggagagtactcttcacctcgtcctccgtctccgtggtggcatgcagatcttcgttaagacactc

SEQ ID NO: 26061 - DNA, 267 bp, Glycine max
  Clone ID: 701098252H1
gaagatggttcaagaggctgagaagtacaagtctgaggatgaagagcacaagaagaaggttgaggccaaaaacgctttggaaaactatgcatacaacatgaggaacaccgtgaaggatgacaagattggtgagaaacttgacccggctgacaagaagaagattgaggatgcaattgagcaagcaatccagtggttagacagcaaccagcttgcagaagcagatgagtttgaggacaaaatgaaggaattggaaagcatctgcaatcc

SEQ ID NO: 26062 - DNA, 262 bp, Glycine max
  Clone ID: 701098256H1
agctaccaaagacgctggtgtcattgctggtctaaatgtgatgcgaattatcaatgagcctactgcagctgccattgcatatggtcttgataagaaggccacgagtgttggtgagaagaatgtgttgatttttgaccttggtggtgggacatttgatgtgtctttactcaccattgaggagggtatctttgaggtgatagccactgctggttgacaccatcttggaggtgaagattttgataacaggatggtgaaccacttt

SEQ ID NO: 26063 - DNA, 263 bp, Glycine max
  Clone ID: 701098257H1
aacagagcaaagagagagtgtgtgaaaagtgaaacaaaaaacagaacaacaatggcgacacttaaggttcctcagcctcttccccccgttgcagatgattgtgagcagctccgaaaagccttctcaggttggggaactaacgaggagctgattgtatcgatcttggctcataggaatgctgctcagaggaagcttatcagagaaacttatgcccagacctatggagaagatctcctcaaggccttggacaaagaactcacgag

SEQ ID NO: 26064 - DNA, 261 bp, Glycine max
  Clone ID: 701098258H1
ctcaaaacaagttatggtagtatttgtcattcatttcacaaaaccggttcacttttggactcatggcttctaaaacccctaccttattccactctcgtttcttcctcttcggcttctattgctgggactgggaatttctcaccgctctcctcctctttagttcttcttcctaattaattaaattacatacaccttttctttctttttatttttaacctaaatttctcattcgtataacatcaacaaaagaggcataggttt

SEQ ID NO: 26065 - DNA, 72 bp, Glycine max
  Clone ID: 701098259H1
gaaggttcgacggaagaatcttctctgactcgcccaaaccaaacgctttttttttctttccacacaacatac

SEQ ID NO: 26066 - DNA, 268 bp, Glycine max
  Clone ID: 701098260H1
gtttgttccatctcttgcttcttgcttctattacttgcttctttcttcaccatgtcacttgctgggaaaatcaccactgaaattggggttcatgcaaccgctgcaaagtggttcaacctctttgcaacacaacttcatcatgttcaaaaccttactgatagagtacatggaaccaagctgcactcaaggtgaagactggcatcacaacgagacagtcaaacactggacttataccatagatggtaaggctacaacatgtctggagagt

SEQ ID NO: 26067 - DNA, 69 bp, Glycine max
  Clone ID: 701098265H1
tcacttttcttcatagcactcaaaaaacaacaactcatctcatcattattccctttctcactcagcaca

SEQ ID NO: 26068 - DNA, 262 bp, Glycine max
  Clone ID: 701098273H1
ccgattcctgttggttgttctctcaagtctcaactcccaccccccctctttgactacttctatcagaagagcttgttggagttgaaaactgagaagaaaacatggcagcacaagggcctgtggtagtagcatcacttctaattttctgtttagctggaagttgctatgggaaggttcacctctcttccttgaaaagaacccttgatgtcactgcttcccccaagcaggaacaagttctggaggctggattagacaaaatcac

SEQ ID NO: 26069 - DNA, 263 bp, Glycine max
  Clone ID: 701098276H1
aataaaacaaaacacaagccaagtgaaagtcagactaaatcaaaatcaaagagcataatctcagggaccattcacaagattcgggagacccttcatgtgggagggcacaagaaggaggaggagcataagggtgagcaccatgctggagaatacaaaggggagcaccatggtgaacacagtagtgagtacaaaggagagcatcatggtgaacacaaagctggagagtaccatggtgagcataagccagagcacaaagaggggtt

SEQ ID NO: 26070 - DNA, 220 bp, Glycine max
  Clone ID: 701098277H1
ctcgcactcgagaatttttccggaaaatctcaccctcatttctcagccaagagaaagactaacaaaaaaaacactcgaattccttcttaattctttcccgattcgaaggatagagaaagagaaaagaacagaaaaaaagttaatggcatcactgggatctccgtcttcatcattctggtgctaccgctgcaaccgcatcgttagggttccacacaacata

SEQ ID NO: 26071 - DNA, 269 bp, Glycine max
  Clone ID: 701098281H1
ccagattgaacaatgatcacgtgcttgaccaagttgacaaggagagcaaagttgagactggtacaagttatcggttgtttggaattgatcttattgatcattctaggaactctccttcagtagagaaggcatctgcacaagcaggaaatgcacccaaagttactactgaaggctgcaccagtaccttgacccgaactgatgctggccatctgtcggatgtaccaatggcttcttccaaggagaggaaacaagagcagcagcaagtatca

SEQ ID NO: 26072 - DNA, 260 bp, Glycine max
  Clone ID: 701098285H1
ccaaataagatgggccatttgtattgcgggggctttgtataattgtacaattatctacttgtaagaagttcagattcgggcgacaacatttgtaatgcagaattaggtcattaacattgtaaatcttctggcgatgattggaatatcaatgtgaagacgctatatgacttctgctatgacaatatcattgtggttgtcaaggtatttttgaagaaatatcgtggatttacaaagaatctggttaggcttctacaattctt

SEQ ID NO: 26073 - DNA, 251 bp, Glycine max
  Clone ID: 701098286H1
gaagaacctgatcgatatgttctgcttgggaaccatagagatgcatggacgtatggtgctgttgatcccagcagtgggacagctgcactactcgatattgctcgtcgattttctgctctattgggcttgggttggaagccgaggaggacaatcattctctgcagttgggatgcagaggaatttgggatgataggatccactgagtgggttgaacaaaaccttattaatcttggttccaaagctgtagcata

SEQ ID NO: 26074 - DNA, 247 bp, Glycine max
  Clone ID: 701098288H1
ctcatctgattcccctagcaaccttcttcttacttctctccgcttcttatctccagattgctggggcgtaagacaaccgttgactagtctcaagcttaactctcatattcttcaggagtctactgctaaagagattaatgaaaatcccgaggcaggatgggaggctgctataaatcctcgtttctccaattatacagttgaacaatttaagcgccttcttggagtcaaaccaatgcctaagaaggac

SEQ ID NO: 26075 - DNA, 259 bp, Glycine max
  Clone ID: 701098289H1
cttctacacaaccattacccttgcccgttttgaagagctaaacatcgatttattcaggaagtgcatcgagcccgtggagaagtgtttgcgggatgccaagatggataagagtaccgtccatgatgttgttcttgttggtggttctactaggattcccaaggttcaacagttgttgcaggacttcttcaacggaaaggaactttgcaagagtattaacccagatgaagctgttgcttatggtgctgcagtgcaggctgcg

SEQ ID NO: 26076 - DNA, 255 bp, Glycine max
  Clone ID: 701098290H1
cttcttcttcacaggaactctatattgcctagataaactaggctactcttatttcttttttcctttcaatctcattattattctatttgattcatttagattatatggagttaaagaaaattatagttacaggtggctaaggcttggcaagttctatggcctactctgatacttgggcaatgtgtgatggaaaatactactctggaagcttacaatataaattgcagatagcaagtaagagggcttattgtagga

SEQ ID NO: 26077 - DNA, 262 bp, Glycine max
  Clone ID: 701098291H1
gccttcaaggcttcttgaatcaaaacaagtattccctggggagaagtttattttaaatggtgataataggtgcctcgacatggtattggagcaggatgctatcggcaaagatgcattgagagggtggctagttgcttcatatgctgtacaaattggcaagtcctctcacgagctcagtaccagtaccctgctacaggcctatgagaaaatgcatgaggtcttccctgcctttataaaagaattacagtgcaaagggtggcat

SEQ ID NO: 26078 - DNA, 266 bp, Glycine max
  Clone ID: 701098292H1
caactctgcttccaacttcccaagtttcacctataattcctttcaactttcaataacatcacataccacagtctctcatatcgctttctctcatgaatataatgctatcatcatccaagcaagaataagcaacaaaatgagtcaaagtggctacatgaatgagaaaccaggcttgtccttgagacagaattccaataggaaatcaaccagaaatgggcaagtgaagagctgcatgttcagaattccttggcagtctgagacctctc

SEQ ID NO: 26079 - DNA, 268 bp, Glycine max
  Clone ID: 701098294H1
ctcgagccgctcgagccgctaagttctatggattacttgggcttgggtttcaggagatcacagttgaaaactgtgtgccagtatggtacaatatggtgaagcaaaatcttgtaagcgaacaggtgttctctttttggctcaatggtgatccaaaagcgaaagatggtggtgaactaatttttggaggtattgatcctaaacacttcaaaggagatcatatttatgtcccagttactaaaaagggctactggcagattgaaatgggaga

SEQ ID NO: 26080 - DNA, 157 bp, Glycine max
  Clone ID: 701098295H1
cccttgccgactacaacatccaaaaggaatccactctccacctcgtgcttcgcctcaggggtggcatgaatcttgtcaagatttgatggagaatccctgagtgatctgaacatatattagcaacagcagagtccataaagtttttgacatagtgaac

SEQ ID NO: 26081 - DNA, 262 bp, Glycine max
  Clone ID: 701098242H1
agaacatatcctgttctctggttttggaatccagacaggttgttctctttgtttgcaattctctcacttctttcttcctcattatctagttaagcatggcaacagttatggacatgtacaatactagtagcatcatgataccagatttcttagaccagtgtagtgatcaagagctgatgaaagcacttgagccttttatgacaagtgattcatctagcattacatacccttcattctcttccttttgcttcttctcccaatt

SEQ ID NO: 26082 - DNA, 253 bp, Glycine max
  Clone ID: 701098201H1
ctcgtatttttcaaggggacgtcgcgacgacgacgacacggtggacgactacgacgagtacgaccccaccccatacggcggcggctacgacattcacctcacctacggccgcaccgtctctccttcagaagaaacctgctacccactcggagtctcttccgatgaaaacttcgattacgatccgccgccagtacacctcttacgctgaacactctgcttatggcgatgaagccctggccactgagtatagcag

SEQ ID NO: 26083 - DNA, 277 bp, Glycine max
  Clone ID: 701098202H1
cgcacctacataactaaataatcttatgcataacaatttcacaagtgttattttgcgttaattttcttcagttatgagggtgaacacagagtttgagcgtgttcttaagtattttgatgaggatggggatggtaagatttccccatctgagctcaggaaccggctaggcatgatgggtggtgtgttattgttcaaagacgctgaaaagttgattgaggaattggattctgacggtgatgggtttttgagtttggaagattttgtgaagataatggag

SEQ ID NO: 26084 - DNA, 275 bp, Glycine max
  Clone ID: 701098203H1
ctcgagccgtgagtttcttctactttgtgagaaacttttagtttctacttcagagaaggtgagaatggtctaagaagaagccttgcatggcgagccaaagcataggagaaacgggtttgtctgagtcaggaccttcaagtcaccatatcccttatggagttcttcatgggattaatacttcatcatcagccctaatcaatcaagggtcagcttttgattttggagagctggaagaggctattgttctgcaaggaattaagataagaaatgatgaa

SEQ ID NO: 26085 - DNA, 270 bp, Glycine max
  Clone ID: 701098204H1
aaatcaatcaaattctttgagttgaacacaggggccaagattccttctcttgggttagggacttggcaagctgaacctggtgttgtagctgaagctctcaccacagccattcaggttggatacaggcatattgactgtgctagtgcgtataagaatcaagcagagattggttctgctcttaagaagctttttgatgatggtgtggtgaagcgtgaggacttatggatcacttccaaactctggtgttcagatcatgcaccagaagatgtg

SEQ ID NO: 26086 - DNA, 268 bp, Glycine max
  Clone ID: 701098205H1
cttggacccagatctcagctccagaaatcaaggattttctttgaatcatggattttagctaaataaatcataaatcttcataaatggatcaagttgctcctcctccgattctcatgcaccgcaagcgcgatctctcctacgccgtcgtttcgcctgctcccaacccgagctggagctgggactgggacagcgtgcgtttcgccggcaaaccaccgccaccactctcctccccaaacgacgacgtcgtttttgaggagagtgttgcgcc

SEQ ID NO: 26087 - DNA, 265 bp, Glycine max
  Clone ID: 701098206H1
agctgaattgctcaggtatcactccactaagagtggtgatgagatgaccagcctcaaggactatgttaccaggatgaaggaaggacagaatgacatctactacattactggtgaaagcaagaaagctgtcgagaattcccccttccttgaaaagcttaagaagaagggatacgaggttctctacatggttgatgctattgatgagtatgctgttggccagcttaaggaatttgagggaaagaagttggtctctgctaccaaggaa

SEQ ID NO: 26088 - DNA, 264 bp, Glycine max
  Clone ID: 701098207H1
tgcatttgcactgtttgtaggtgtctccgtcgcagccaacatctcgggtggccatttgaacccagctgttacttttggattggccattggaggcaacatcaccctcattactggtttcttatactggattgcccagttgttgggttccattgtggcatgcctcctcctcaatttcatcaccgccaagagcattccaagccacgcaccggcaactggtgtgaacgattttcaagctgtagtgtttgagattgtaatcacatttgg

SEQ ID NO: 26089 - DNA, 268 bp, Glycine max
  Clone ID: 701098209H1
aatgaatgctctggtgcgggcatcagcaattatcacaaatgcaccgtatcttctgaatgttgattgtgatcactacattaacaatagcaaggcacttagagaagctatgtgttttatgatggaccctcaacttgggaaaaaggtttgctatgtgcaatttcctcagagatttgatggaattgatagacatgatagatattcaaacagaaatgtggtatttttcgatattaacatgaaaggattggatgggatacaaggtccaatatat

SEQ ID NO: 26090 - DNA, 266 bp, Glycine max
  Clone ID: 701098210H1
accaaaccaaaaccccacttccaatttcctcttctacgtgcctctagcttgttctaatttgaataatttggcatggacaacatgaggctcatgaggaaacacaacactactcacacatgcatggccaataattcacacacaccttcttcttccctagccatgcacaaaggttcccacatgatatccaaaaccaaaccaaagattcgcataatccacatatttgcacccgagatcataaaaacggatgtggagaacttcagggagct

SEQ ID NO: 26091 - DNA, 265 bp, Glycine max
  Clone ID: 701098211H1
gcgagagagagagagaaacaaagcagcacccatttggatcctctcttctcttctttgatctccgttaccctttttgttttctcaacagagagagagagagagaatctttcgaagttcgtttgcgtgtgttgtgtggtcagtcaccgatggcagcaccacctgcgagggcacgtgccgattacgattacctcatcaagcttcttcttattggcgatacggtgtgggaaagagttgtctgcttttgcgattttctgatggttccttc

SEQ ID NO: 26092 - DNA, 265 bp, Glycine max
  Clone ID: 701098212H1
cctttgtatggtttaggagagcttccccaggcatttgcacggcttagtgctgtttatggtgggacatatatgttgaataagcctgagtgcaaggtagaatttgatgaggaaggaaaggttgttggtgtcacatctgaaggggaaactgcaaagtgcaaaacagttgtttgtgatccatcatatttgcccggcaaggtgaggtccgttggtagggttgcaagagcaatagccataatgagtcacccaatccccagcactgatgatt

SEQ ID NO: 26093 - DNA, 123 bp, Glycine max
  Clone ID: 701098213H1
tgtttggccaaacactcccattcccactgcactgcgagacttctaaagcctctcctgcaggtgttgaaatcctgaactcctaagcaattgatataacagacccaaaaatctcataagagactc

SEQ ID NO: 26094 - DNA, 270 bp, Glycine max
  Clone ID: 701098214H1
ctgattcgggtaatggccaccagtggaggcgatgaggggcagaacaaccctgccctcgacccggatttggatgctccggatgacccggatcacgagttcgctgagttcgggtcgggttgcttctggggtgctgagttggcctttcagcgagttgtgggtgtggtgaagactgaggttggttacactcagggtcacactccggatccgaattacaaactggtttgcaccggaaccactaaccacgttgaagtggttcgggtccagttcgac

SEQ ID NO: 26095 - DNA, 266 bp, Glycine max
  Clone ID: 701098216H1
actccaccagaggaacattacactgacatgacaagcaagatacactgacatgacaagcttcctgcacatgacactattaccaaatgtattggcagatacattcttgttgagtgaggtggatgctctcattttttaagagttggaaagagggaaagggagtgtgaacgattttgaagatcgaggtatgctggtggatgtccacacgaggctcagggtaattggttggtgggccttaaaatgcgagagtttggcagggttacatttta

SEQ ID NO: 26096 - DNA, 96 bp, Glycine max
  Clone ID: 701098219H1
ttcttctcagcacataatcgatcgagctctgttgattcgattgaaatcgaagaagaaggaggcaagcttcaaccctagcgtttccacacaacatac

SEQ ID NO: 26097 - DNA, 269 bp, Glycine max
  Clone ID: 701098220H1
gattttgtgattgatggaactgaatcgacacccgagcagcaagcagctttagctgagatcaggaaaaagaaaagcttgctcatccagcagcataggatcaccaagagcaatgcagagaatcggccaactgttccaaggaagtttgataacgacaagcagttcacatcagaaagaatgggaaggcaactgtcatctttggggcttgatcccagtttggcaattaagagactgcacagcagatctgtctctagaggtcggaaaagggatag

SEQ ID NO: 26098 - DNA, 266 bp, Glycine max
  Clone ID: 701098224H1
aaaacgttcagggagcatcaaattgtggctcaagactctaatgtttcaactgcagatgataaaataattcatacattctccataagaactgagggaggggaggctgctgctatacagttgaaagaaaagcttgaagcatccctatccaaaagttgattgtcagatcatatttatgtgtagcatctcaatgatattgtaaaccatgttagaaatactctgtcttgtaggttaagtggctaacataatattgttcttagtgcactttg

SEQ ID NO: 26099 - DNA, 265 bp, Glycine max
  Clone ID: 701098225H1
cttctgcgcaaacttaaaaagctgtttctttttctcgatcctaatgcttctctttttagcaactgttgctctgctctacgttaaggacaagcaagttgaagcaattcctctggatgatgccactcaaccctcttgtttctttcagcttttcggtgctctgaaagagctcaagagaccgatgtggatgctgatgctggtcacagctgtgaactgggtggggtggtttccttacttccttttcgacactgactggatgggtcgtgag

SEQ ID NO: 26100 - DNA, 266 bp, Glycine max
  Clone ID: 701098227H1
agctcgagcgctctctctaacccatatataattaatgactctagcaagtttcacagaacagatgtatctttgtcttgcatcttctatactggtgattttgtatgtcctcctactagccttggattccccatggaccaacaaaggagtctctttgatgctgcaagattgcaacttccctattcttacagaaagtatatatgtctacaactcagaacaagaagaggaatgaatccctgaaggaaatagatttgagattcagctacctt

SEQ ID NO: 26101 - DNA, 273 bp, Glycine max
  unsure at all n locations
  Clone ID: 701098233H1
caagcactataacaaggattttggaattgagtgccgcattgggaagttccacaacatatacggtcccgntgggacatggagaggtggaagggagaaggctcctgctgctttttgtcgtaaagttatcacttcctctgatagatttgagatgtggggggatggattgcaaacacgatcatttaccttcattgatgaatgtgttgaaggggtgctcagattgactaaatctggtttccgagagccagtaaatattggaagcgatgacatggtcag

SEQ ID NO: 26102 - DNA, 265 bp, Glycine max
  Clone ID: 701098234H1
ctggagttcggctgttgactgtttgattacagggtattgctttgccttaagcgtgctttaaggattgcaaatgctgctcaacaaatggccaatgcagcaaggggtagcagtggtccagtgacgctctttgttgaaatactgaacaagttggtcaccttttgctataaaactacttgttatactatcttcatgattttcttacttacggatgagagtgagtctcaggcactctactatgttgagacaggatacctcagatcactag

SEQ ID NO: 26103 - DNA, 260 bp, Glycine max
  Clone ID: 701098239H1
gagactacatggcctgctcgtaagcacgtggttgcgtgtgctgctgtgtgcaggtcctggagaggaatcgtgcaaagaaattgttaccagtcctgagttctgtgggaagattactttccctgtctccctgaagcagcctggttcaagggatggaaccatccagtgtttcatcaagagagacaaatctaatctgacgtaccacctattcctttgtcttagtcctgcattgctagttgaaaatggaaagtttcttctttctg

SEQ ID NO: 26104 - DNA, 264 bp, Glycine max
  unsure at all n locations
  Clone ID: 701098240H1
cacaaagcaaacacctccaactacaaacaaacacacttcacaactttcctttttctctctttcaatgtcctcttcttccttctcccccgccactctcaccaccgagcaggagctttccgtcatcgttgccgcccttaccaacgtcgtcgccggctccacctccgcctccagctccttctccctccccgaattccgccttccacagacctctgatcccctcgncgccgcctgcctaatgccgccgccgccgccgccgagcatgga

SEQ ID NO: 26105 - DNA, 261 bp, Glycine max
  Clone ID: 701098241H1
aaagaagaaaaaaaaaactcaaacaccttcaagaacttgtatctttctttgttagtatttgttactacaattttacattcttttcatctctacatatttcattagtcatggcacctcaagcagtttccttcaagtccttcgccgttgctcttattgtggcgcttttcttctccgcctccgctctggacttagtttcggggcagtcgccggtcccggcgccggtgccggactagatgccggagcagctggatccgtgtcgag

SEQ ID NO: 26106 - DNA, 250 bp, Glycine max
  Clone ID: 701098196H1
cagtcttcaaccatggccacacccttggcctaccaagagcatcttccggcggcacccagttggctgaacaaaggtgacaacgcatggcagttaacagcagccatcctcgttggtcttcaaagcatgccgggtctcgtgatcctctacgcaagcatagtgaagaagaaatgggcagtgaattcagctttcatggctctctatgcctttgcagcagttctaatatgttgggtgcttgtgtgttaccgcatgg

SEQ ID NO: 26107 - DNA, 260 bp, Glycine max
  Clone ID: 701098133H1
ccattacgctagaggtcgagtcctctgacaccatcgataacgtgaaagctaagatccaggacaaggaaggtactccaccagaccagcagcgcttgatcttcgccggaaaacagctcgaagacggcagaaccctcgccgattacaatattcagaaagatcgacgctcaatctgtgctcgactccgcggagggatgagatctcgtgaaacgtcaccgggaaactattactctggaggtgagagtctgatacgatcgatacgt

SEQ ID NO: 26108 - DNA, 256 bp, Glycine max
  Clone ID: 701098138H1
tgaagatgagatctcaatacattcctgaggaggccaggagcaccatcatgaactttttccgcattcctctcaacatttttgtgtgtgttgtgctgtacaatgttgatgcattccctatcactgttatgtttggcatgtgctcaattttccttttggtggcttgtatcttgcaaaggcgactgatggtgatttccgataagccaaaaacagaagattggcaattgaaggatagggacgcagagtcagaaccattgaa

SEQ ID NO: 26109 - DNA, 252 bp, Glycine max
  Clone ID: 701098146H1
cttcgaattcgaattgttccatttgcttcgcaaaacttgcaactacttccacagaaagacaaaaattttctaagttaaggcaatccagagtgaaaacaaaaaaatggccggtgacggtgcagctacatgcatggacatccttcttgccattattctccctcctcttggtgtctttctcaaatatggttgccaggtggagttctggatttgtttggtgctgaccctttttggttatatacctggaattatcta

SEQ ID NO: 26110 - DNA, 248 bp, Glycine max
  Clone ID: 701098147H1
ccagcaaacccagttgtcaaggctgaaaagcttgataagatctaagatttgaagttgaagttccatgccctgagatgaagttatgcacaatttcatcatgaaatgatccgagtctccttcacattttattggtgttcttattatattgttatatgtggtgggtgacttgagtcattggacatctctgcaatttgaaggactctttcatgtgattggtgaaaatatatatgttggccactgttgttttt

SEQ ID NO: 26111 - DNA, 252 bp, Glycine max
  Clone ID: 701098148H1
cgaagattgagagttagggtttaagcgaaatcagatcagagaagaaggcatcatcatgtttccaggaatgttcatgcgcaagccagacaaagctgcagcactgaagcagctgaaatctcacgcggccatgttcggggcatgggttgttgttattcgagtcaccccttacgttcttcactttctcagcaccgagaaagaggaacttaagctcgagctttagcttctcactcttcctcggcagagtggattttg

SEQ ID NO: 26112 - DNA, 276 bp, Glycine max
  Clone ID: 701098149H1
gctgcatctgctgcagaggcggcagcagctgctggtgaaagtagtctcagatcttttatgattgctgtacaacgttctggaagcagtgtagctattacccaacaatactttgctaattctatatcccgggctttggttcccgttgaagggtgaaaaggtggtggttggtgaggaatgggcaatagcattgtcaggtgaagaggctgctgcttataaaggactacaacagtgcattgaaactgtcatggctgaggtggagcggttgctttcagctga

SEQ ID NO: 26113 - DNA, 130 bp, Glycine max
  Clone ID: 701098150H1
ccgggggattcggtaccgagggcagtaccggcaagggttacggcacgggttcggggtgtaccggttctacaccggggatgtttttgccggggagtgggtgagtcgacagagtcatgggtgtggggttcac

SEQ ID NO: 26114 - DNA, 255 bp, Glycine max
  Clone ID: 701098152H1
cgatcaaaaggttggaatttgtggggcaatgatgttgtccaatgggagccttttgagaaggaatctgtaccatttgggactaatcaaatcatgttcttgaatcagacggtagagcacatgaatttaggagtgagtttgttctatgcaacatgtgtagtataatattctttgcttcagatttggggtttgtgtacataaaaatttaaaggtggaatttggtgatagttgttgttctagttggttgggttgggtttg

SEQ ID NO: 26115 - DNA, 238 bp, Glycine max
  Clone ID: 701098154H1
cgcaagacgaaagaaagaatcccaggcgaggagaaagatggaggggaaggagcaggatgtgtcgttgggagcgaacaagttccccgagagacagccgattgggacggcggcgcagagccaagacgacggcaaggactaccaggagccggcgccggcgccgctggttgacccgacggagtttacgtcatggtcgttttacagagcagggatagcagagtttgtggccacttttctgttt

SEQ ID NO: 26116 - DNA, 252 bp, Glycine max
  Clone ID: 701098163H1
ctactctcacagctgtttattttcttcctctcctcaactgtgttcgtgtgtatgcatttgagttgaaagccagactcaaggagctgaaagacaaaagaagaaacttggatttgaatcagccaaaatttgagttacacgtaattgcaaagataagatgagtgttatgtatagtcctgttctcaattactcagatgtggagcatcagctaaggaaaaaccaagacatggattcaagtattggacatccacacaa

SEQ ID NO: 26117 - DNA, 78 bp, Glycine max
  Clone ID: 701098167H1
tggaattcaaatttcgcattcaatctttgtaactgacagataaaggcgacaatatctcatctttcctctcacaccatc

SEQ ID NO: 26118 - DNA, 269 bp, Glycine max
  Clone ID: 701098168H1
gtctctcgaagcctctttctctctcttgtagaagctatctgtgtttggtgttactaagtctccaacaagcaaagtacatggttgatcttggaatccaggtccctaccccattcgacccgtttgccgaggcgagagaatcggatgcccccggagcaaaggagtatgtgcatattcgaattcagcagaggaatgtgaagaagagtctgaccacagtgcaagggctgaagaaggagttcagctacgagaagatcctcaaggacctcaagaag

SEQ ID NO: 26119 - DNA, 239 bp, Glycine max
  Clone ID: 701098173H1
ctcaaaagggttgtgacggatccttcaagggaagaaagtgggtgctcgagtggtgtggagtgcattcttggcattctaagggcccttaagatggggtcctgcttctctgcggaaagcaggagccctcaccccaattcaccaaattcatcatctttcaggaagagcaagagcaactccaagaagaggcttggatcaagaacctcttcatttgagtattggaggaatgagcctctacatag

SEQ ID NO: 26120 - DNA, 229 bp, Glycine max
  Clone ID: 701098174H1
cgcctcaccggccgtggcttgatcaaccatttgatccccaacgtggagcacctaagacgtgtaggggtgccgcagggccccattgcccacctggtgtgcaaccacctcggtgtggtgtgtgtggagcacacgaaattcgtggaggctgtggagaaggtggtgacattcgggtttgatccgatgaaaaccatgtttgtggaggcgcgtgaagtggtggttgggactagca

SEQ ID NO: 26121 - DNA, 250 bp, Glycine max
  Clone ID: 701098179H1
cccacagaaccattccatagaaatgtcaggcgttggccctctttctcaagattgggaacccgtcgtcctccgcaagacggctcccactgccgccgccaagaaggatgagaaagccgtcaacgccgcccgccgctccggcgccgaaatcgaaaccctaaaaaaatataatgctgggacaaataaagcagcatctagcagcacttcattgaacactaagaggctggatgatgatactgagagtctagctcat

SEQ ID NO: 26122 - DNA, 271 bp, Glycine max
  Clone ID: 701098181H1
ctggcgtcgtctggttttgctctgtcatagttacaatctgggtgctagttgatagttgcattttgtaggctggaaatgaaagtgagggctgtttgcagggaaaattacgactatatacgctatgatctccaaggaaatggctttccctcctccttggcaagaccctctcaacttcaaaaaccgtcgcaaatggacctgggacaagcgtatctgggttttgaagagagctgcccggctttatgctgcaagctgggttcgtgacattggtcct

SEQ ID NO: 26123 - DNA, 253 bp, Glycine max
  Clone ID: 701098185H1
ccgagcgaagaccaccgcgtaacggaggacgcgaacgtcgtcgttcgggcggagtccttaaactgctgcatcacgagaatcgccaaggacgacggcaccacactcctctcgtggaacgagaagttcctcttggacatgcccatgcatgcaaggtccataaccttcgaagtgcaatgtaacaggttcaagggctttcggcggctcggggtggcccgaatcgccgcctccgatttcctcgcggcgcgtgccggaa

SEQ ID NO: 26124 - DNA, 247 bp, Glycine max
  Clone ID: 701098187H1
ccactctcttgaaaggattggagacaattgctgcaagtgcagatattccaatgttcgtttgtggggactttaattcaattccaggaagtgctcctcatgcacttcttgcaatggggaaggtagatccatcgcatcctgatttagcagttgacccacttaatatattgcgtcctcacagcaagttggttcaccagttgccactggtcagtgcttattcgtcttttgctagaacggttggtcttggatt

SEQ ID NO: 26125 - DNA, 91 bp, Glycine max
  Clone ID: 701098188H1
cgtttattgaatgagtagaactaagatatgacaattggtgtaataaaatttctcccatttctttcaagtaaaagcaaaaaaaaaagaaaag

SEQ ID NO: 26126 - DNA, 251 bp, Glycine max
  Clone ID: 701098189H1
gcaaaaagaaagaatcccaggcgaggagaaagatggaagggaaggagcaggatgtgtcgttgggagcgaacaagttccccgagagacagccgattgggacggcggcgcagagccaagacgacggcaaggactaccaggagccggcgccggcgccgctggttgacccgacggagtttacgtcatggtcgttttacagagcagggatagcagagtttgtggccacttttctgtttctctacatcaccgtctta

SEQ ID NO: 26127 - DNA, 245 bp, Glycine max
  Clone ID: 701098190H1
cgaattttatcacgggattaataattagctcatagtttttttggaagacttgtgaaaatgggacttgtggagctttttggggtggcatctatgcccgtgatcaaagtactactaatcactgctgttggcttgcttcttgcactggacaacgtaaatttgttgggaaaagatgctaggatacaagtgaatcatcttgtgcattatgtgttcaatcctgcactggtgggtggcaatttggccgacac

SEQ ID NO: 26128 - DNA, 249 bp, Glycine max
  Clone ID: 701098191H1
ccggacataagacagcgtcctagtcgcaaccctaataagaagaaccacagcttcaagcgagtcacatccaccagccatgggtcgtatgcacagccgcggtaagggtatatcctcttctgctttgccctacaaaaggacaccccctagctggctcaagatctcttcgcaagacgtggaagacaatatctgcacacctgcgaagaagggcttgatcccgtctcagattggtgtcattcttcgagattctca

SEQ ID NO: 26129 - DNA, 247 bp, Glycine max
  Clone ID: 701098192H1
gttacattccaaacaaaggtggttcctggcactgatggtaatggctctatcgccaaggccactctcacattccacaccaaagacgatgataccactctcagatgcagtgcgtgatgaaacaaaggccaggggtgctggaattttcaaggccattgagggctacgttttggcaaatcctgcccaatgattatccttcaaaccacttgcatgcatgcaataataattatataagcttatgatctggttg

SEQ ID NO: 26130 - DNA, 247 bp, Glycine max
  Clone ID: 701098195H1
cccggtgtgagtctaatatttgcagtgctgaaaatgtcgcagttgttggacaaagccaaaaactatgttgcggagaaagtcacgaacatgcccaagcccgaggcgagtgtcaccgacgtggatttcaagcgcgtgagccgcgacaggtacgagtacttggctaaggcctctgtttccaacccttattccactcccattcccatttgtgagatcaagtactccctcaaaagtgctggcaaggagatag

SEQ ID NO: 26131 - DNA, 253 bp, Glycine max
  Clone ID: 701098132H1
atttggcctgtaggaaggggaaaccattaggattaatgtgaagcacaaatcaactagtggaactggcatgctctcagctgctggcctaaccagtgggcatgctgcgacaccaaagccaaaaatcgtgagtcttgctcccccaccaagtggagctgggaaaatcaggtctcctcttccacccccaccaaatgatccagttgctgctcggactgcttccaccagtcgtgctactggtcctaaagggacatacgaa

SEQ ID NO: 26132 - DNA, 261 bp, Glycine max
  Clone ID: 701098101H1
ccacgattatgtagtgattcacatattcatgctcttcacaaagaattggatgaagtttcatgtcctatctgcatggaccatccacataatgctgttctcctcctttgcagctctcatgagaagggctgcagatcttacatttgtgataccagttatagacattcaaattggctggaccggtttaaaaaaatgaagggcaattccaagggggacccaaaatttaccaagtccttaagtaaccccaacaattctggttcagga

SEQ ID NO: 26133 - DNA, 273 bp, Glycine max
  Clone ID: 701098102H1
catgcctatgcttgtttatcattttcttactttcctctcacgctctgccacaaaactccgtctccgcaataacggaataaaaaaacaagtttaattactattatggccgccgaggatcataagaccagccacgctaaaggtaaccgtaaccgtaacaaccggggcgaagaagtgaatttccttggattaagaaaaaggccttggggaaaatacgccgcggagatcagagatcccggcaagaagagcgcgtctggctcggaacttcgacacggc

SEQ ID NO: 26134 - DNA, 218 bp, Glycine max
  unsure at all n locations
  Clone ID: 701098103H1
attctctctctcattctcttctccatcgcgcgtaagaaacacattttagttgctactaatgggaactgttgaagctgcaaacaaggatgcaaatggaagtctcctagagaacaatccttcagtcgtttttgtgttaggtggcccangaagtggaaagggtacccaatgtgcnaatattgtcnanaatttttgggtatactcatctcagcgctggtgat

SEQ ID NO: 26135 - DNA, 275 bp, Glycine max
  Clone ID: 701098104H1
gctggaagtaacgctagcttcagaagtcgatggtttgctttcttcgcaccgtgtccgcccgcctcttctcctcctcggaatgcagctgatatagtttacagaagttgtgaaggaccaacagagcacttaagagagtttaactgagagctgcaaggatggctcatttggatgtttgtcatcaagtcaggttcattggtcagcttgaggaatatggaagtagactttcttccagtattcctacggtagaaggatcaaaagataaagaagaaatcgtt

SEQ ID NO: 26136 - DNA, 268 bp, Glycine max
  Clone ID: 701098105H1
agccaccaccgccaacaaaacaacgggaaatgataatgaagaggaggaagatgaaacagcaatagatgcaacagcaggcagagaagaagaagatcatcaagaccaagacaagactaagaaacagctcaagccaaaaaagaagaaccaaaaaaagcaaagagagccgagatttgcgttcatgacaaagagtgaagtggatcacctcgacgatggctatagatggcgcaagtacggtcaaaaagccgtcaaaaacagccctcatccaagg

SEQ ID NO: 26137 - DNA, 251 bp, Glycine max
  Clone ID: 701098106H1
cagatattaatgatgttgagtatcaatggtatatacgccgaactagacgatatatatcgcataaggcgacactgtctaccgaggaggccaaggatcccctggagaaggcagtgctagatggtagacagctagccctgaagattagtgccaattctgtgtatgggtttacaggggctaccattggtcagttaccatgtttagagatatcatcgagtgtaacaagctatggtcgacaaatgatcgagcacacg

SEQ ID NO: 26138 - DNA, 257 bp, Glycine max
  Clone ID: 701098107H1
acttcattcgaagcaggcaacaaaattgatgatgacgatgaagacgacaacaacaacgattacagctttgcgttttacgtgaatcgcgatcaatcagacaagtcgtctcgctccgccgaagagctcttcgacggtggcaaagccaagcccttgaacgagtcatcacgtgcgacttctgttgctgaacaaaaaagaggcagagaaagagagagaagttcttcttcaacaacaacaacaagttgtcgtctcgaattcgg

SEQ ID NO: 26139 - DNA, 256 bp, Glycine max
  unsure at all n locations
  Clone ID: 701098108H1
ctcatatccttatcctgtttctttcaatggaagtcatttctgcttctagcttgaatcccaacgctccgatgttcgtcccactcgcctatcggacggtggaggatttctccgaccagtggtgggacctcgttcactcctccccctggttccgcgactactggctccgcgagtgcttccaagatccccagttccanaacgacgacgctttcgacttcgactttgacctagatctccaagatgaagatgaaagggacga

SEQ ID NO: 26140 - DNA, 258 bp, Glycine max
  Clone ID: 701098109H1
ccaaagggaacacctctagaagggatcctctttcttcctcaaaccttagagactctactgtgttgcctggctcttcagttttatctcatgatgataccttggaggatgaaacaacatatgtttccagtgacaagaatcgatttggttggcccaaacagctagaaagggaaccctctcctccgaataatgtggaccgtgttccaagtggtagaatggggggaaatttgataccatctgtgtattctgatccacaaaatg

SEQ ID NO: 26141 - DNA, 253 bp, Glycine max
  Clone ID: 701098112H1
cggctcgagaacgaggagaagcagaaggagcaaaagcaatggcgccgaagaagccgagaaccacgacaaggaaccctgatttggttagggggattggcaagtattcgaggtcgcagatgtaccacaagacgggcatctgggccatcaaggccaaaaaccgtggcgttttgccccgccacgatcccaagcccaagcccgaggccccggcccagaagccgcccaagttctaccccgcggacgatgttaagaagcc

SEQ ID NO: 26142 - DNA, 255 bp, Glycine max
  Clone ID: 701098114H1
ccgtattcgaggcaagacgcgaccttacggtgtgaaggggggccggtagcgaaagcacgccgaacccaaatacgacgaagaagaccacagaaacgcaaccaaaaaaagctgtggtggaggtggagcacaacaaagaagaagaacaacagcaacaaacaccagagggggatgaattgagcggtatcccaattacgcccagtgagaacaacaccaacaaacccaacgtcatcttcattctagaaaagctcctttgga

SEQ ID NO: 26143 - DNA, 252 bp, Glycine max
  unsure at all n locations
  Clone ID: 701098115H1
catttggagtttggagcgactgaactaatcattaatttgcactcgctgtttcagcttcatcacccttcttttgcatcatttatatctcttgagaaatggcacaagaaacctttctattcacatctgaatctgtaaacgagggtcaccccgacaagctgtgcgacnagatctctgatgcagtacttgatgcgtgccttgatcaggaccctgacagctaggttgcctgtgagacatgcaccagaccacatggtc

SEQ ID NO: 26144 - DNA, 254 bp, Glycine max
  Clone ID: 701098116H1
cctgtatcgatacacaaggaaggagaaggcaaaaaaatcaattatgttacagtatttgaacgccctgggttgaaggaatttttaaagcaactcagtgaatttgctgacatggtgctgtttacagctggtcttgaaggctatgctagaccccttgttgacagaatagatgtggaaaatcgattcagtctacgactttatcggccctcaacaattagcacggaatatcgggagcatgtcaaggatcttacctgcat

SEQ ID NO: 26145 - DNA, 156 bp, Glycine max
  unsure at all n locations
  Clone ID: 701098117H1
aaaaaccgacacaaagatctagtcctagctagaatcaaacaggggcgatctcaccttcaagaacacatcgccatggcaaggaacttgcttctcgtngcttntgcagtagcaccctcctccatggctcagcagccaaaccagacacatggtcggtga

SEQ ID NO: 26146 - DNA, 105 bp, Glycine max
  Clone ID: 701098118H1
cacagttggaaaaaaaaaaaaagttgttcgagatggcacgtacgaagcaaactgctcgtaagtccacaggaggaaaggcacctaggaagcagctcgaaaccaagg

SEQ ID NO: 26147 - DNA, 273 bp, Glycine max
  Clone ID: 701098119H1
cccaaatcaatcaaattctttgagttgaacacaggggccaagattccttctcttgggttagggacttggcaagctgaacctggtgttgtagctgaagccctcaccacagccattcaggttggatacaggcatattgactgtgctagtgcgtataagaatcaagcagagattggttctgctcttaagaagctttttgatgatggtgtggtgaagcgtgaggacttatggatcacttccaaactctggtgttcagatcatgcaccagaagatgtg

SEQ ID NO: 26148 - DNA, 254 bp, Glycine max
  Clone ID: 701098123H1
cgaggcccagcaaattgcgttgctagctaatgcctcattactagctgatgaactacttcctcgtgcagctatgaagctttcccccataaatcaggctgcatacaaggatgataatcgaagaagaacctcagaaaggcaaaatcgtcatcctgaacaaagagaatggaggagaagacttgttggttcagttgacagattgaaagatacattttgtcgtcaacatgcattggacctatttttaaagaggaagtgat

SEQ ID NO: 26149 - DNA, 258 bp, Glycine max
  Clone ID: 701098124H1
ctgacaaggagattcttcaaattgtgaaggagaattccgacttcagacctggaatgatcaccattaacttggacctctaagacgggtggccataggttcctcaagacagctgcttatggacactttggaagggatgaccctgacttcacctgggaagttgtgaagccactcaagtctgagaagcctcaagcttaagattgttgtgaagttaatcactcccttcaatggatgtcttgctaggtgtggatgaataatttg

SEQ ID NO: 26150 - DNA, 254 bp, Glycine max
  Clone ID: 701098125H1
ccgagggtttcgctccgtttcaatggggagcgaagagcagaacggcgaattctacctgcgttactacgtcggtcacaagggcaagtttggtcacgagttcctggagttcgagttccgcccagacggcaagctccgctacgccaacaactccaactacaaaaacgacaccatcatccgcaaggaggtttacctaacccccgccgttctccgcgagtgccgtcgcatcatcgccgagagcgagattatgaaggaag

SEQ ID NO: 26151 - DNA, 249 bp, Glycine max
  Clone ID: 701098126H1
cgatgatgtaggacccactatcttttataatttccaagaagagaatgtgttcaaaagagtgtattgttggcatttctgttgtataattgtaagagatttatgagaaattttctgtatcttctaagtgaattgttttgttgaataattgcagaaacaatagtgctttgttgaaaaacatattttcaaaataaactgggacaggtttgtaaaaaaaaaaaaaaaaaaaaaggggcggccgccgattattga

SEQ ID NO: 26152 - DNA, 224 bp, Glycine max
  Clone ID: 701098127H1
ccaatttttgacaaggctcgtggttctgctccatgtgtcctattctttgatgaacttgactctattgcaactcagaggggtagtagtgtcggagatgctggtggtgctgctgacagggttttgaaccaactgcttacagaaatggacggaatgtcggcaaagaaaactgtgttcatcattgggggcactaatcgaccagatattattgacccagctcttctgcg

SEQ ID NO: 26153 - DNA, 252 bp, Glycine max
  Clone ID: 701098128H1
ccgagttcaaggagacggtggtgataaacgggagggtgcagggagtgttttacaggaactggacgattgacaacgcgacgcaattagggttgaaggggtgggtgacgaaccggagggacgggtcggtggaggctctgttctccgggagtgttgacgcggtgcaggaaatggagcagaggtgtccgcgtggccctcccgatgcggttgtcaccggccttcaggttttcccctccgacgatgaacctgccacta

SEQ ID NO: 26154 - DNA, 254 bp, Glycine max
  Clone ID: 701098129H1
cctaatttgtctttctctatctctatcggtcatgggtgcttttgcttttgatgaggaaaactcctccaccgtggctccggcaacactctacaaagctctgacaaaagatgctgacactatcatcccaaagattattggggccatccaaactattgaaatcgttgaaggaaatggaggacccggaaccgtcaagaagataacagctagtgaaggtgaccaaaccagtttcgtgctgcaaaaagtggatgcaattg

SEQ ID NO: 26155 - DNA, 254 bp, Glycine max
  Clone ID: 701098130H1
ccagcttttgatccggaagctccccttccagaggctggttcgtgacattgcccaggacttcaagactgatctgcgtttccagaaccacgccgtgcttgcattgcaagaagctgctgacgcataccttgttgggctctttgaggacactaacctgtgtgccattcacgccaagcgtgtaaccattatgcccaaggatattcagctggcaagaaggattcgtggtgagcgtgcttgagttggtggttggaaagatg

SEQ ID NO: 26156 - DNA, 254 bp, Glycine max
  Clone ID: 701098131H1
ccaaaaccctagtaaaaccctcgcgtgcttggaaatggcgtttaactcaattcttcgcaagtcgggttcttttgcgagggctcttgctgtcgcgggtcaattgacgaagaatagcaacctgggtcatcgctctctacacttcaccgccatcaaccagcaccaccacaaggattcgtttgttccaaggttccacttttcttctgtagcttccaagaagaaaccaacctccgatgagaaccttctccgggtcatcg

SEQ ID NO: 26157 - DNA, 236 bp, Glycine max
  Clone ID: 701098096H1
gcaaaggaataaggggtttgcagtgttccacccacacgcacgcactagcagaagcagaagcgcaacagcgtgtaaccctaattagggtatgcaagccgatttgggattcgcctttcgcgtgatcgcagcgctggatccgtaccgtgttcctccgtctacggtagcgccttttgctcgacccttcgccgatctcggaagcatgtacggtcccgatgggcaatgttgggaagcggggg

SEQ ID NO: 26158 - DNA, 248 bp, Glycine max
  Clone ID: 701098050H1
gcttgtcactgtaactcgttctacttctcctgttgttctgtgtttgtgtgtagtctttcactcacctgaaaatgtcctgctactgtggtaactgtggttgcggaagcccctgcaagtgcggcaacggctgcggacgctgcaagatgttcccagactcgagctacactgagtcaaccaccaccgagaccttggtcatgggagtggcacctgttaaggctcatttgagggtgctgaaatgggtgtgcccg

SEQ ID NO: 26159 - DNA, 254 bp, Glycine max
  Clone ID: 701098052H1
gaataacgaagcctcctcgtccttcttcttccgccctttctctctctagaaccgtacggtcgcttctttctctctcctcaaccgcagacagcgtcgcctgcttttctgaatctcgcggtgttgttagttctgcggcggttgtagttccggcggcgatgggacagcaatcgttgatctacagcttcgtcgctcgcggcaccgtgatcctagcggagtacccgagttcaccggaaacttcaccagcgtggcggcgc

SEQ ID NO: 26160 - DNA, 165 bp, Glycine max
  Clone ID: 701098053H1
cgaacatgctatgagcttgctgttgcgctactgagtcattagcgtaggccatcatggaggacgatgaccctatcgttcgcgagatggacgtctatgtatgcaacgagtttatgggctccagcacgcaactagcactgctacagcaccctctgcggcctccacaca

SEQ ID NO: 26161 - DNA, 260 bp, Glycine max
  Clone ID: 701098055H1
cgattacgatggattcgagttcggagcatcaagaattcgattatttgtttaagttgttgatgattggagactctggggttggcaagagtagtcttcttctcagtttcacctccgatgcttttgaagatctctcccccactattggtgttgattttaaggtcaaatatgtgacgatggggggtaaaaagctgaagcttgcaatttgggatactgctgccaggagaggttcagaacactgacgaattcttattaccgagggg

SEQ ID NO: 26162 - DNA, 261 bp, Glycine max
  Clone ID: 701098056H1
ctccgaactccgaagcccttcagcaaccatgtcgaggagaaaggttagggacccaaaggaggaaaatgtcactcttggtccagccgttagagacggtgaacatgttttcggcgtggctcgcatctttgcctccttcaacgacaccttcatccatgtcactgatttgtctgggagggaaacccttgttcgcatcactggtgggatgaaagttaaagctgacagagatgaatcatctccatatgctgctatgcttgcagcaca

SEQ ID NO: 26163 - DNA, 255 bp, Glycine max
  Clone ID: 701098057H1
ctctgcgagatcttcattcgccgaatttaaaagatgagtaagcatcagagtgatgctttgcgtgaagccatttcaggaatcatggccgattccaaggagaagaatcgcaaatttgtggagaccatcgaactccaaatcgggttgaaaaactacgatccacagaaggacaagcgtttcagtggctctgtcaagctgccccacatccctcgccccagatgaaaatttgcatgcttggtgatgctcagcatgttgaag

SEQ ID NO: 26164 - DNA, 254 bp, Glycine max
  Clone ID: 701098058H1
ccagctgaatgtttttgataaagcacaaagtaactaaatttgctgctttcaaagacatcaagacttaagattttaagtttagggattcaatatttgtgagagcaccaacaacatcctcacatagtgcggcttatgttttatatatgagagacgtacatgacatgacaagggcagactacagctctttgttcagcagacaaaagagtgtaataaagtaaaacataagacaagacaaagcgatacaagcaaagaga

SEQ ID NO: 26165 - DNA, 252 bp, Glycine max
  Clone ID: 701098059H1
ctgtatatggatgttggatcctctcgatgagaatctccggcgccctgtcgtccgctacggcgaattcgtccaagccgcgtatcaagtcatccattcagacgccgccatcgtcaacggaggagccgccacacacccaatacgtcgcacttcccgatagatcctaccgaatgaccaaaagcctctacgccacgtcatccattggtttacccaaagggtagatgacgtggcaccggatctaggatggatgaccca

SEQ ID NO: 26166 - DNA, 253 bp, Glycine max
  unsure at all n locations
  Clone ID: 701098060H1
cagcttttctccaaaaccatccaaccacggatccagaatattattccatttttcaattatggcatcctcaactcaattctccaccactcttgttaccctatgtctcttccaattcctagcaggtttctctccaangacattcacgattgtgaacaagtgcagctacacagtttggcccggaaactgcaccgccacggggtgcgtggtggatttaacacgccgtgcccggcggagctgatggtgatgagcagcg

SEQ ID NO: 26167 - DNA, 255 bp, Glycine max
  Clone ID: 701098061H1
ctcacaaccgaaacactttccatctctctcacaaaatgacaacaatatcaaatctctcccttctcttcctcttcctcttcctctccaccctccacatagctcgcaccccctcaacccccaccaacttcatcaagtcctcctgcagcaccacccagtacccagccctctgcatccagtccctctccgtctacgcctccaccatccagcaagaccccacgagctcgtccagacagccctctccctctccctcaacca

SEQ ID NO: 26168 - DNA, 88 bp, Glycine max
  unsure at all n locations
  Clone ID: 701098063H1
gtttgcagtgcgatcgagtaaacgcaacacacagtagtanactacgagtcagaattggagatcagggtctatcggggctctgtttgga

SEQ ID NO: 26169 - DNA, 252 bp, Glycine max
  Clone ID: 701098064H1
ctccagcaactcactggaatcaatgtcatcatcttttacgcgctactcctgttcagctccatcgggtttaaggatgatgctgctctaatgtcagctgtgatcaccggcgttgttaatgttgtcgcaacttgtgtctcaatttatggtgttgacaagtggggtaggagagcccttttccttgaaggtggagtccaaatgctcatttgccagctgtagttgcagctgcaattggagcaaagtttggaactgatg

SEQ ID NO: 26170 - DNA, 262 bp, Glycine max
  Clone ID: 701098065H1
gttcacttggctacaatccctgtcactggaaccggcattaaccctgcaaggagtttcggaccagctgtgctcttcaacaacgacaaagcctgggacgaccaatggatttactgggttggaccgtttgttggagctgcggtggctgcaatctaccatcaatacattcttagaggttctgcaatcaaagctcttggatccttcaggagcaacgcttaattaaaaaaaaaaaaaatcaagtttctccactacctaaattatgatg

SEQ ID NO: 26171 - DNA, 264 bp, Glycine max
  Clone ID: 701098067H1
caacaagttaatagcattccgcaaaatggctgccaccaccttagtctctgaagtcactctcccctcctcctccggccagcggaagatgccgctgatgggcctcggcaccgcgccggaagcaaccagcgcggttaccacaaaagatgctgttcttgaggccatcaagcagggctacaggcactttgatgctgcttctgcttatggtgtggaacagtctgtggagaagccatagctgaagcacttcagcaaggactaattgcatcc

SEQ ID NO: 26172 - DNA, 202 bp, Glycine max
  Clone ID: 701098069H1
gttcctttttgatcttttatccagtctgcatgctatctgtttgcaagattaggaatacagaatatacccaggcatgcctaattgtaacttttgagcaattgactattcttttttctgtatagaggatctcacgtcttattttaaagataaagtgtcttgatttaatccttgataatctaaagtcaattattttgtcacactc

SEQ ID NO: 26173 - DNA, 260 bp, Glycine max
  Clone ID: 701098071H1
caatttaccagctatacttgttccttttgaaggttagaagtgctacaatacaaacaatggcagctactcaggaagatgtgaagcttttgggtattgtgggaagcccatttgtgtgcagggtccagattgcccttaagttgaagggagttgaatacaaatttttggaagacaatttgggcaacaagagtgatttgcttctcaaatacaaccctgttcacaagaaggttccagtgtttgttcacaatgagcagcccatagca

SEQ ID NO: 26174 - DNA, 258 bp, Glycine max
  Clone ID: 701098072H1
ggttcccgttgcgtgaagccaccgatcatctatggtgatgtgagccgcccaaagccaatgaccgtcttctggtcgtctctggctcagagctttaccaagcgcccaatgaagggaatgcttaccggtcctgttaccattctcaactggtcctttgttagaaatgaccaacctagatctgcgaccacctaccagattgctttgtctatcaaggacgagtggaagaccttgaaaaggctggcatcactgttatccaaattg

SEQ ID NO: 26175 - DNA, 252 bp, Glycine max
  Clone ID: 701098075H1
gtggagagagcacctcactctgcaagtgatggagcaacaggatcaatcttgttttcaacgctggcaacttcggtggatgctcatcccactaaaagagcatcctcatcaagagcaagtaaagggaaacttgcgcctgcccatattcaatcaggtaaaggtgagatggaaaaggctttaaatgacaatcccatgaaatcagcatccgacgtgttgagccccggagatccaatcgcaggatccagccaacatcaa

SEQ ID NO: 26176 - DNA, 232 bp, Glycine max
  Clone ID: 701098077H1
ctctcatcaccaaacaagttaattaactcaagaaagattgtttcagcataatctcatatgttttggattgaaattttaagtacaatttgttaaatatttgaaaggcgacaaagagtttttagaaaaaatttaaaatagtaaaataaaaattggtcttggtctaatcctgagtgtgcaccaggctgcaccagcatatataccccttctctttcactctcttccagacaacata

SEQ ID NO: 26177 - DNA, 249 bp, Glycine max
  Clone ID: 701098079H1
caggatatgaaaattgggcagagtgcattaagatcctaaatgaaaacgaaagtggaacaggctcagctcccttaacacggagcggaattgtataaaataattacatcgagtaatgagattctttttctaagttatttcttctttgagaggtaactatttgctaacttgtatctttactttctttcatttggaagtccatattggctttatttgtagcaaagggaccattaaagctctggtagaaatgca

SEQ ID NO: 26178 - DNA, 262 bp, Glycine max
  Clone ID: 701098082H1
gtttgttgttctctcaagtctcaactcccaccccccctctttgacttttctatcagaagagcttgttggagttgaaaactgagaagaaaacatggcagcacaagggcctgtggtagtagcatcacttctaattttctgtttagctggaagttgctatgggaaggttcacttctcttccttgaaaagaacccttgatgtcactgcttccccgcagcaggaacaagttctggaggctggattagacaaaatcacagtgacatgg

SEQ ID NO: 26179 - DNA, 251 bp, Glycine max
  Clone ID: 701098089H1
tgattggaaaggcaatcattaaaactcacatacagacgatattcatcatctcagtttgcaacaatcaacttcttcattggattgagaatgaatttatttgggttctcagccacatacctggttttgcatctgtcttgcctagagtgacttctagtctccgtgcaatgaaagataagtatctgaaaaaagattcccatccagtttccccaataagcagggggaaaagtgggatttttctttcactttagtct

SEQ ID NO: 26180 - DNA, 245 bp, Glycine max
  Clone ID: 701098092H1
cgctgagttgcgtgcaaagcacgaggcacatggtgtgctcttccctgcacttgcaagtggagaattggaggttgttgaggccatggtggcggaagaccccactgtgttggaacacaacattggctgtgacaggctttctcctctgcatgtcgctgctgccaatggtcggatcgaggttctttccatgttgttggataggtctttaatgttgacgtattgaatcgacataaacagaccccgttgat

SEQ ID NO: 26181 - DNA, 252 bp, Glycine max
  Clone ID: 701098093H1
cgcggagtattcaaaggtctaaaagtcttgatacagaaccatcgtccaaatcagaaaaatactcccttttagacctttgaatactccgctcaaccattttactctgtctagttcttctaatataggaagtttcagaatcatcctcgttactatcgaactaattcgagtttcattgagtgatcctaccaatgcctttctgaatatttttcagagaaagatgaatcacacaaaaacgtagtttggctttgacag

SEQ ID NO: 26182 - DNA, 249 bp, Glycine max
  Clone ID: 701098094H1
cggctcgaggccgaaccaaactccgaagctatggcagagctccaaaccaaggttgaacctgttacggtcccggctccggtggatcccgagccaccgctagctgaggctccgccgctcgagaagaaagccgtggcggtgccaccacctgttccggctgcggcagaggaaaccaaagctcttgttattgtggagaaggagaaggagaagagaagataccagaacctgtaaaaaagaacgcctcaggtggat

SEQ ID NO: 26183 - DNA, 264 bp, Glycine max
  Clone ID: 701098049H1
ccagaatattgtaattggtaatgtggctctatatggggccacatctggtgaggcatatttcaatgggatgacagctgaaaggttttgtgtgcgtaattctggagccaaggcagtagtggaaggtgttggcgatcatggatgtgagtacatgactggtgggatagtagttgtgcttggaaacacaggcagaaattttgctgcaggtatgagtggtgggattcttacgttcttgatatggatggcaaattcctatctcggtgcaac

SEQ ID NO: 26184 - DNA, 257 bp, Glycine max
  Clone ID: 701098012H1
cttcttctcatcatttcttttcacacaaaaaggtaccatggaccggagcctgggactgttgtttcttgttgtattaggtgctgcttgggcatgtgatgcaagggaactggctaactctgaaacttctgaactaagcataaaaccggatgtgtgtgcactttgtgaggaatatattaccaaggcacttgattatctacatgaaaacaagactgagcagagatcattagtatcctgcacaacacttgccaccagcttcc

SEQ ID NO: 26185 - DNA, 256 bp, Glycine max
  Clone ID: 701098013H1
gattgtagaatactttgaggcaattccaggggttccaaaaattaaagagatgtacaacccagcaacatggatgctagaagtgagttctgtagcagctgaagttcgtcttggaatggactttgctgaatactacaaaacatcatctttgttccagcgaaacaaagctcttgtaaaggagttaagcacacccccgcctggagctactgatttgtattccccactaagtattctcaatccacattggggcaatttaaat

SEQ ID NO: 26186 - DNA, 162 bp, Glycine max
  Clone ID: 701098016H1
cttttcttcatagcactccaaaaacaacaactcatctcatcattattccctttctcactcagcacattctccacagccaaaccatcaccaataataatggcatcatcctcatcaaccgttgctctgagaaccatctcctctttctctctgaaacctgccaca

SEQ ID NO: 26187 - DNA, 69 bp, Glycine max
  Clone ID: 701098017H1
tgagttcttatatgtatatacaaaaaaaaatctggtgttgtgagtcgcggccgtgttccacacaacata

SEQ ID NO: 26188 - DNA, 270 bp, Glycine max
  Clone ID: 701098019H1
tcggactcaaacacacagcacgacgaaacctagcagcctcacgccctcatcgcagcagggacctagccgtcgccggagacgcactgagtctgagagcagcggtgactaaatcaggtttgtacaagaggaaaaggagagtaacgattcaagtttgatgcactaaatcaatcaaaattgttgcaatgggtgatatctagatacgaaagatacacagatacatacgtgtggtaaggtggagcaaccggttcttccttctccttgtgctaagcg

SEQ ID NO: 26189 - DNA, 270 bp, Glycine max
  Clone ID: 701098020H1
aagtttccatttaatactggatcataagctgttaaattttctgcatggctggaggatagaggcaactacctcacagaagtgggcgctaatcttgctgaagatctacaatgtggggacatttttcatttgcttgctttagtctcatcgggtgaactttcaatttctccattcctaccagacaatggccctggagagtctgaggacttgagaagtgcaaagcataaatatcatactaccaagtcttcatatagtgataaagccaaaaagtca

SEQ ID NO: 26190 - DNA, 265 bp, Glycine max
  Clone ID: 701098021H1
caccttcataccttccacacaacatactacacacattgcatccatttgttatgcatcaacaaggagttcccaaactagttgcatcacatgttcctcaatcacatgttgggcattttcacccagtgccgtcaatgtcacctgtgcagcagtggcaaaatcatcagtctgtgtcagagggtccacaggtacctgtacaggaacattcttcaccatctcaaactgacaacatttgatgagatcagatgctaagtttagctctgaaatg

SEQ ID NO: 26191 - DNA, 267 bp, Glycine max
  Clone ID: 701098022H1
gccagtagtcatatgcttgtctcaaagattaagccatgcatgtgtaagtatgaactaattcagactgtgaaactgcgaatggctcattaaatcagttatagtttgtttgatggtatcttctactcggataaccgtagtaattctagagctaatacgtgcaacaaaccccgacttctggaagggatgcatttattagataaaaggtcaacacaggctctgcctgttgctttgatgattcatgataactcgtcggatcgcacggccttt

SEQ ID NO: 26192 - DNA, 258 bp, Glycine max
  Clone ID: 701098026H1
ggtcctcactctttctcatttccacatatcagacaaacacaatggagaactatcagtacccggcgtcgtaccctgactcacgtcgagtccaccccgcgctcggcgagatcgacttcgagaacccgccgccgtgggacgagcagcagaaccaaaactacaaggccaagttcatgtgcagctacggcggcaagatccagccccgcacccacgacaatcagctctcctacgtcggcggcgacaccaagatcctcgccgtcg

SEQ ID NO: 26193 - DNA, 258 bp, Glycine max
  Clone ID: 701098027H1
cgcttttatatctttcaaaaaccttcaagcccttttgattgtaagtatgaggaggaactgcaacttggaacttgccctttttcttccctctgattctggcccccgccaccaccactcaatggttgaagaagctagtgaaataagcccaatccaaaatttcttccatcaccaccaccgccaggaacagcaacagcaacagccgctcaccattttcatgatggaaatatttgtgttgcggatgtcacagagcttcaggta

SEQ ID NO: 26194 - DNA, 256 bp, Glycine max
  Clone ID: 701098028H1
ctcgagccgttctagcccttctccagccggtgctgtcactcctcccccacagaactctggtgctgcatctcttggagttgttggagtatttgccaccctgctttcagttgccgccacttttttctactagatcctccacgagattattctagtcaggagcttgcgagtcatcatcatcgctctttgattgtgtttcatgaattcagtttttttctatttttttgaggatgacaataaagttagctttaatttaatt

SEQ ID NO: 26195 - DNA, 256 bp, Glycine max
  Clone ID: 701098029H1
gtggaggcattttaccgttcaagaggaaaattattggagtttaacctgcctggaggaatcccggagtcttggcctaagttgctacatgctcttaatcttgatgattatgaggacaaacgatctgctgcagcataacgatataataatgtatcataacagtaagtatttcattctttgcgtgcatatattgcatgcttggcaattttgcaggacgagagccaaagaaagggaacttccatgtgagtattattttgga

SEQ ID NO: 26196 - DNA, 256 bp, Glycine max
  Clone ID: 701098030H1
ggacaacctgatcaacaaccaaagaactcagtgttctcaaatgcactctctagtcctattcgacgcagccttcagccatatcatttggcacaggggagctttccttcatgtaatatcatgtcttcaggaaatggaacccggaatagtgacatgacttatcctaatggccagaacagggacacaaattcttccaactccagtgattgcatggatagcattcagatagtcctggtcatgatttttcatactgatgctg

SEQ ID NO: 26197 - DNA, 277 bp, Glycine max
  unsure at all n locations
  Clone ID: 701098032H1
gctcagcattcaactcgactggagatacagatgcagttccattcagaaactccaccctatacatcncttcacgacaaccttaggaatctcgatcgctgataaaacctatgcagtcccgaacacactctctgcatttcaacttgtttaagtcacgnctttcgattcacccttctctcaataaatttttaatcagattcttggccaccgccacactcataataaagccctgtttttcaaataaagggcatggcgnattctgttgagcctccaaatggga

SEQ ID NO: 26198 - DNA, 268 bp, Glycine max
  Clone ID: 701098034H1
cggctttctgccgcagaagctgaaatagaggacttgagatccaagctggatgcatctgagagggatattttggagctgactgaggctgttaaagttaaagatgctgaggcagaggcatatatatccgaaattgagactattggtcaagcatatgaagatatgcagacacagaaccaaaatctgttggaccaggtgatcgagagggctgactataatattaagctgtatcagatagtgtgaagacaaaacaggcgcacaacactttaat

SEQ ID NO: 26199 - DNA, 118 bp, Glycine max
  Clone ID: 701098035H1
cggctcgagctcgagcgctcgagccgaataagaaaaaaaattgatgatagtagatatcaaagtgagcggtcatcacgtgtgatgatattggctcaaaaacattgattctaatctccaa

SEQ ID NO: 26200 - DNA, 263 bp, Glycine max
  Clone ID: 701098036H1
gtcgatccgggctgaagacattgtcaggtgagggagtacgaggagtgcattgagagggacagtgcggatgttgtggcagtgaacaacaaggctctgtgtttgatgtatctgagggacttgtcggattctattaaggtgttggagagtgcgcttgacagagttcccactgtggctctcaatgagacgcttgttgtcaatttgtgtagtatgtatgagttgggtatgttaatcactctgatgttaagagaacgcttagtagctgg

SEQ ID NO: 26201 - DNA, 264 bp, Glycine max
  Clone ID: 701098037H1
aagcactctctctttcccttaccctttttcaggtttcaacgctccaactatccatggcaaaccgctggctcagacccgaggtgtatccactgttcgctgcggttggtgctgctgttgggatctgtggattccaactggttcgtaatatctgcatcaaccctgaagtcagggtgaacaaggagggaaggaaggcaggagttttggagaactttgctgagggaagaagtatgccgagcacttcctgaggaagtatgtgcgcaacag

SEQ ID NO: 26202 - DNA, 259 bp, Glycine max
  Clone ID: 701098038H1
ggttggacacacagggtctaatgtaaattcttctgccttatcaaagacaagaaaagggggatctcgtgctgcaacagctggttgaagaattgataatttggtggttttcatccttggcatggtaatatctccttccaatatctcgttaccagttgcagcatcagctatccatcaagtcattttttaaaaataattctctctttttgatccactactgcattataatggttcgattggctgctctactatggaagattag

SEQ ID NO: 26203 - DNA, 257 bp, Glycine max
  Clone ID: 701098041H1
ggggaacacggagaagctgatgaaccagatcatggaattgaagttcacgtcgaaatcgctgcagcggcaatcgcgtaagtgcgagaaggaggagaaatcggagaagctgaaggtgaagaaggcgatcgagaaaggcaacatggacggagcgcggatctacgcggagaacgcgataccgtaagcgcacggagcagatgaactacctccggcttgcctccgcctggacgccgtcgtgacccgcctcgacacgcaggcga

SEQ ID NO: 26204 - DNA, 249 bp, Glycine max
  Clone ID: 701098043H1
cagatttaagtctctctaaacttcttgtttatagtgaaaggggccatgtcactactcaagtgcaatggacaattggttacttggatcctgaatattacatgactcagcagttgactgaactgagggatgtatatagcattggagtgttaatgctataactatcaacagcaagaaggccaatatagcaatgccattatattgtaatagcggcatgagggtaatggacatatcataagatttatacaacct

SEQ ID NO: 26205 - DNA, 255 bp, Glycine max
  Clone ID: 701098044H1
gataactaggaagtttcctaaacatcccttctttcaaaaaaccaatggctttcaagaacttgtccgttcctactctctgtgtttcccttgtgctttccttctttgcaccgaattccatagctgctaacaaccgtgcagtggttcctccagaaaccatttgcaactccaccgtaaacccttccttctgcaaaaccgtgcttgctaatcaaaatgcagcatcgttgactacggtcgaatttctgtccgaaagtcctt

SEQ ID NO: 26206 - DNA, 255 bp, Glycine max
  unsure at all n locations
  Clone ID: 701098045H1
tagcaggtggctgcacttcacctgggcaaacttggacctaagctgacccagcttagcaagtcccaggctgattacatcagtgtgctcgttgagggtccatacaagcctgctcactacatgtactaagtgattgacatgatcaactgaaaagtgagtgagggacagacaaaaatcggttttatcaatcggatttgattgtttaattttccttttttgatttttggtgttcgnattttcagagctgtggtagaagaa

SEQ ID NO: 26207 - DNA, 256 bp, Glycine max
  Clone ID: 701098046H1
acctcgagcgaatcggctcgagcactccatcaccacaaccccaaacgttcttttctctctcactctgccctaactcccattactccaacttcaatttcatactcaaatattcctattccaattccaatcctattcgtttcgattcctcttcccccagtttggaaattttgttgctggaagaattgcttaagggcatataactggctttattcactgggatcagagagtgcggctccaatggttgagacatcaaaaa

SEQ ID NO: 26208 - DNA, 85 bp, Glycine max
  Clone ID: 701098047H1
ccatcccatgcgagtcaaaggttaataaacctaaatggataccacgttgtttagggtagtgagtactttccaacaccaacaccaa

SEQ ID NO: 26209 - DNA, 259 bp, Glycine max
  Clone ID: 701098011H1
gcttcgtttccaggtttcggcgcaatcggcttctccttcaaggcaggagagcttgttattctctatcaacaagtaaaatgtcaggtgaagagggtgtcattgcagttgagccagctgctgctgctgctgccatcccaggcgagccaatggatatcatgactgccttacaacttgtgctcagaaaatctctggcttatggtggtttgtcgcgtggcctcatgaaggtgcaaaagtgcttgacaagcatgctgcacaactc

SEQ ID NO: 26210 - DNA, 246 bp, Glycine max
  Clone ID: 701097971H1
cgtctccatcctaatagtgttaattcgtctttctctatctctatcactcgatgggtgcttttgcttttgatgaggaaaactcctccaccgacgctccggcaacactctacaaagctctgacaaaagatgctgacactatcatcccaaagattattggggccatccaaactattgaaatcgttgaaggaaatggaggacccggaaccgtcaagaagataacagctagtgaaggtgaccaaaccagtt

SEQ ID NO: 26211 - DNA, 244 bp, Glycine max
  Clone ID: 701097972H1
cggattaaagctgatatatggtcatgtggggtaatcttgtatgttctattggctggtcatcttccattccaggagtacaaatctgatggagatgtacaggaagattggtagaggggaattcaaatttcctaaatggtttgcaccggatgttcgccggtttttgtccagaatattggatccaaacccaaaggccaggatatcaatggccaagattatggaaagttcttggtttaaaaaggggttg

SEQ ID NO: 26212 - DNA, 243 bp, Glycine max
  Clone ID: 701097973H1
caacatgctcgtcttactctagaagggtctaaggattacccctaccctcgtaggggaagaactagtagaccaccggccaaatcagatcctaaatgtgagagtaggctgaatattgcctcgagcttagacatctatcgtccaagggatgaaagattctgtcacttgaaaatggcggattttcttgcctatgcactgaaatccatagttcaagttctcaaaccggagtctgaatctctattcgac

SEQ ID NO: 26213 - DNA, 177 bp, Glycine max
  unsure at all n locations
  Clone ID: 701097975H1
gtttctttaaccagagaaacttcattacagttgaccacaaataatttgtcagctgcacctgtcaagagtggagtcatccccaagaaatcaattacctgtgatccggatccaaggaagcatccatctcagactggggntagcctagtcagtctggtagacctaccacattagatctct

SEQ ID NO: 26214 - DNA, 75 bp, Glycine max
  Clone ID: 701097977H1
atcaatcagtccgattcctgttggttgttctctcaagtctcaactcccagcccccctctttgacttttctatcag

SEQ ID NO: 26215 - DNA, 247 bp, Glycine max
  Clone ID: 701097978H1
atgaaaggcatggccattgacatgggatctgaaattgggagccaaaaccaagccttggatggttttgacaatgatatggagaagttgatcgtccgcgtgaatggtgctaatcaacgtggtcgtcgtttgcttgggaaataggggtgtatatcatgagatcgacgctaatttttaatatgcattagtcaatcaaaggagcttccaatgttccaggatactgatttcaaatatagtaatgtacaatacg

SEQ ID NO: 26216 - DNA, 250 bp, Glycine max
  unsure at all n locations
  Clone ID: 701097980H1
ctccctcctcgctctctctccgtgtcctgagacatatcatgccggagatggcgatcgtantcgctcgtcgttgcggcactcgcggcgttggtgctattcgcggcgagtgtggcggtggatgctcaggagaactcggacgtgaagacgctggtgaagtacaagcacgggaagaagtactgcgacaaaggatgggaatgtaagggctggttcatttactgttgtcacctcaccattaccgattatttccaga

SEQ ID NO: 26217 - DNA, 248 bp, Glycine max
  Clone ID: 701097981H1
ctcgagccgtgaagaactaaaggcaggattgcatagacttggctcaaagcttacagaggctgaagtgaagcagcttatggaagctgctgatgtagatggaaatggctcaattgactacatagaattcatcactgctacaatgcatagacacaaattagaaagagatgaccaacttttcaaggccttccaatattttgataaagacaacagtgggtttattacaagagatgaactagaaacagccatga

SEQ ID NO: 26218 - DNA, 182 bp, Glycine max
  Clone ID: 701097982H1
ggctcgagcggtctcgagcaaaggtttatgagtcaaggcacacctaaccaataacaagctagctattagctcgactttgtagtaagtgaggtgccaatatggtgaagatagctcttggtactttggatgactcttttagcgctgcctctcctaaggcttctttcgcagagttccacacaaca

SEQ ID NO: 26219 - DNA, 141 bp, Glycine max
  Clone ID: 701097984H1
aaccagtccaatttcctttcctttcctttctctccattggacactgcctcttgtctctctcaattggcttttcttcccttttcctttattggggcagcctctctgcaatccacagataacttagattacttccacacaaca

SEQ ID NO: 26220 - DNA, 232 bp, Glycine max
  Clone ID: 701097985H1
attaccaatcttccaatttcagagaaaattctttgtccggcatctcttaattagaaaaatgtcaagcttccccaacacggtggcggcaggccgcacgtccagcaaggcaccggaaaaatccactttttctcagacttgcagcctcttgagccagttcttgaaggagaaacgtgcttctgctgattccacctttcgaattggacggaaaatggaacccatagcgagtaccaag

SEQ ID NO: 26221 - DNA, 242 bp, Glycine max
  Clone ID: 701097986H1
ctctcagaagcccttgttgtcaacattggggacattatagagattatgagcaatggggcatacaaaagtgttgagcacagggcaacagtgaattcagaaaaggaaaggatatccgttgctatgttctttctccccaagtttcaatctgagattggacctgcagttagcctcacaaacccagaacatctcccgttgttcaaaaggattgtagtagaggcgtatatcaaagattacttcactca

SEQ ID NO: 26222 - DNA, 242 bp, Glycine max
  Clone ID: 701097988H1
agaagacaggttcaaaccggcgcaaaaaaacttgttacgatggtttcttccgacaaggatccacgacaggcagtccttcaagcatggtacatggatgatagtgatgaagatcaaagactcccccaccacaaagaacccaaggagtttgtctcgttggaccaacttgctgaacttggagtccttagctggaaattagatgctgataaccatgaaaatgatccagagctgaaaaagattcgtga

SEQ ID NO: 26223 - DNA, 240 bp, Glycine max
  Clone ID: 701097989H1
aaatttttcattagtattcactgtaggccacctagctttcctctcttcttactattcttgtgttcatgtaaaggttaattgacacataaagacacactcacacaccctgggttcataaatttcattttgcagtaacaacaaaaaataagcatgagttgcaacgggtgccgcgttcttcgaaagggatgcagcgagtcctgtatgttgcgcccttgtttgcagtggatcgaaaccgcccaa

SEQ ID NO: 26224 - DNA, 240 bp, Glycine max
  Clone ID: 701097990H1
ggactctaataatgctcagagtgattctttcttgttggatgacagttccagcatccccttctcagtagatgacttctctacatcactgcaagagaaggatttctccgacatgaaaccagcggatgagctgcttgagaatcccgccttccgatttttaaatgagtaggcaagggaagcttagtgtatgtgtttatcatagtcatatagggaagcaacaaaatcagttgttggtccttgtca

SEQ ID NO: 26225 - DNA, 245 bp, Glycine max
  Clone ID: 701097991H1
cctcgagccgattcggctcgagcaaatcaagcaggaacagagaaaccgagaggacaggcaacgtaatcgtgacctctcaagcttctttcaaagacagagaagaaagaagaaaacaatctcaacaaacacaaacaaacaagcaaacatcaatggcaaactcgtatacgtggctcttcctcgcgatttctgccaccctcttgcttcttctgtcttcgtcgccgacagcggacgcgggagcgctgggc

SEQ ID NO: 26226 - DNA, 246 bp, Glycine max
  Clone ID: 701097992H1
ctccggtgtggcgaatgattactatttgagctcttccctctcacaaactcagaaaacaagtccaatgagcaatttccagagaatatcacacgaatcccaccctcccccagggtacggatctccttaccctccaccccaaccgggttacccatccgcaccgcctcatgaagggtaccctccgccgccgccgcctcacggatacggtgggtaccctccgccgcagccgccgcagcgtccgccgtacga

SEQ ID NO: 26227 - DNA, 248 bp, Glycine max
  Clone ID: 701097993H1
cttagaaagacaaaaacttaaatcaaaatacttaatagcatggcgatacatttatacaatccttctaccccaagcacacgctatggagccgtagacagtcaagtaaaatccaatccacgaaatcatttgatctatggacagcatcgttgtggtaaaggccgtaatgccagacgaatcattaccgcagggcatagagggggaggtcataagcgtctataccgtaaaattgattttcgacggaatgaaaa

SEQ ID NO: 26228 - DNA, 57 bp, Glycine max
  Clone ID: 701097994H1
cgaggaaaagagataaccctgaagcaatggaagaggatgatgttgaagatgaaatag

SEQ ID NO: 26229 - DNA, 253 bp, Glycine max
  Clone ID: 701097995H1
ccactggcttcaagtgtggtataaactatcagcctccaaccgttgttcctggaggtgaccttgccagggtgcagagggctgtgtgcatgatttctaactccaccagtgtggctgaagtgttctcaaggattgatcataagtctgatctcatgtatgctaagacggcattcgtgcactggtatgtgggtgaaggtatggaagacggtgagttctcggaggctcgtgaggaacttgctgctcttgagaaggatta

SEQ ID NO: 26230 - DNA, 254 bp, Glycine max
  Clone ID: 701097996H1
gcaacagagagcaacaattctatctctggtttgacccaactgcagatttccacacttattcaattatgtggaatccccaacgcattgttttttctgtggatggcacccccatcagggaattcaagaatttggaatcaataggagttccttttccaaagagccaaccgatgaggatatactcaagcctatggaacgctgatgattgggccacaaggggtggactcatcaagactgactggtccaaagctcctttc

SEQ ID NO: 26231 - DNA, 269 bp, Glycine max
  Clone ID: 701098002H1
ctttctcctaaaacatctcaatgggttcttcttctattacaacatcgccgcgaaccatgaccatggctgcgatcgtgctcctgttcacggtctttgccgtttcctccgccctagacatgtcgataatctcgtacgacagcgcccacgcggacaaggccgccacgttgcgcaccgaggaggagctgatgtccatgtacgagcagtggctcgtgaagcacgggaaggtgtacaacgcgctcggcgagaaggagaagcgcttccagatcttc

SEQ ID NO: 26232 - DNA, 271 bp, Glycine max
  Clone ID: 701098004H1
cacaaaacaaggttcagagacttttccgattcctggaagaagagaagagaaaacctaacctcacagatccatggcggaagaacaccgatgtgaacctcccgaaggtcaccgactctgcgtcaacaactgcggcttcttcggtaccaccgccacgatgaacctctgctccaaatgctacagcgcgatccgtttgaaggatcaagaagaagcgtcgacgaaatccacaatgaaaccgcgctctcttctgcctcctcggcgaaaccgtcgtcgt

SEQ ID NO: 26233 - DNA, 271 bp, Glycine max
  Clone ID: 701098005H1
cagtaaacaacaaaaggactaaaaaaaactcttgatcattattaatggcctctcattccccaaagagagaaggcccttattatcttaatattgtactattccttaccattctcatctccatcatcaacccttcacaccaagacccttcttcccctctccgcccaataaacccaagactcaccaaagcctacacagcactccaagcatggaaacacaagatcacctcagaccccaaaaacttcaccttaaactggtgtggccccaatgtttg

SEQ ID NO: 26234 - DNA, 152 bp, Glycine max
  Clone ID: 701098006H1
ggagaaaatggggtctctaatggcctctcttactctcactcttgtattggcaatagtttctctaagcttgtgctctcaagcctcagctgacaagtacgactattcatctccaccaccaccagtttacaagtacaagtccccaccaccagcct

SEQ ID NO: 26235 - DNA, 268 bp, Glycine max
  Clone ID: 701098007H1
cctaccttcgcttctgtatttacattttctccttaaactcattcttcgcactcttgcattgcctccacctccttttctccatttatagtataatggctgctgaagtatattaccaggctattggtactttgcagtcccattcttatctgaataatttaaatcatcaccaaaagcatcaaaacaatttagtaacattggtgtctagggattttatcagcagtactgcttgtcaacgagaagaagtaactgcactggccagaggaattgt

SEQ ID NO: 26236 - DNA, 175 bp, Glycine max
  Clone ID: 701098009H1
ctcgagccgctcgagccgcttccgcaccaacatgccccctggacccttcctcgcccccgacccaaacactcgtcgttctcctcgatgccaaaagtttccccgtcctcttcgacaactctaaggtcgagaaaaaagacgtcttcactggaaccttcatgccttccaccgaactcac

SEQ ID NO: 26237 - DNA, 240 bp, Glycine max
  Clone ID: 701097970H1
ataccaacaagtataatgtggaacttaagcctctcttctctgcttttgacattgagggcatttacattgacttcctaaaggtcgttcttgatgttttaattgctccttttggagcctcgtgtggaaatggaagatgatgaggatttcctggaagacgatcagtagcaacatgttgatctggttgtttccttcagaaaatcagtgaagcatatcatgcgtgatacaactgttgtgacacta

SEQ ID NO: 26238 - DNA, 252 bp, Glycine max
  Clone ID: 701097915H1
actcgagcgaatcggctcagggaacctcctatagagtattacgagattgttgaggacgaggctgagattgaggaagagcggacactgaatgatatcagtagaccactccttgtagaagctgagtggcctgacattgagcagaaagagactgaacattctaagacaccctttattgccaggatctttaaaagcatctcgggtgtttcctcgtctaatattcctgagcttgaaagtggtgggactagtccaaag

SEQ ID NO: 26239 - DNA, 265 bp, Glycine max
  Clone ID: 701097916H1
ccaccatcctcaaaatctccaaactcgcgatcctcctcgttttgttcgcttcagtctgcaacgtcgctatgtcggactccaccgccaaacccctcgaccagcacgccaccacgggctctgaccctactgcgccacggttcacatcgtgtacaccgagagaccacagaacgaggagcctgaggcctaccacatcagaaccctcacttcagtccttggcagtgaggaggctgcaaaggaagctttgttgtatagttacaagtctgca

SEQ ID NO: 26240 - DNA, 249 bp, Glycine max
  Clone ID: 701097919H1
ctgccagtagtcatatgcttgtctcaaagattaagccatgcatgtgtaagtatgaactaattcagactgtgaaactgcgaatggctcattaaatcagttatagtttgtttgatggtatcttctactcggataaccgtagtaattctagagctaatacgtgcaacaaaccccgacttctggaagggatgcatttattagataaaaggtcaacacaggctctgcctgttgctttgatgattcatgataact

SEQ ID NO: 26241 - DNA, 91 bp, Glycine max
  Clone ID: 701097920H1
gaaactatgagctgaaaaaagggcttatttcagctcatagtaccaggttacaggcgcatgtataacggctgaaataaagcctgttttccgt

SEQ ID NO: 26242 - DNA, 249 bp, Glycine max
  Clone ID: 701097923H1
cgaattatgagcaaggccaaggctgctgctgctgcttccaaggcggcgaaggctcccaagaagttcaccatcgagtgcactgagcccgtggaggatgacattttcgacattgcttctttcgagaagttccttcacgaccggttcaaggtcggcggcaaggttggcgtgctcggcgatcaagtcaccatcacccgcgagggctccattatcactgttgtctccaaagtcgcgttctcaaaagcttacctg

SEQ ID NO: 26243 - DNA, 250 bp, Glycine max
  Clone ID: 701097924H1
ctctacgccgccaacaaccacattcttcgctacgcctagggatcttccgtttctctcttcaaaactttcttcttcttcttcttcttctactgcgtcgtcctcgccttgttgctcctccatcactcccaaggttaaatccaaagataacaacaattgctacctcgtctccgctaaacattctcccgctaacatgtccgcttcggtttcgtcacgcaccttcctcaacgctcggaacgcacaagagcttcta

SEQ ID NO: 26244 - DNA, 256 bp, Glycine max
  Clone ID: 701097925H1
tcggctcgagagatgatattcttgccaactttcagtattatgccatcttatatcttggttcaatatgaattaagctattttgatgatatgtgcactgccatgtcctttgttgagttattcctgatttagtagaatggaatctgcatacagggcatggttgagagagaagagagaaaggtcaactcctgaggaattaaatgaactatgcagagagctgcaaactgctttaggtaccgcaaaatggcagttggaagaa

SEQ ID NO: 26245 - DNA, 248 bp, Glycine max
  Clone ID: 701097927H1
ctttctttctcccctacacaaaacatggatcatccaatcagcacaccgtcgattaccccaaattcaagcttatcatcgtcagcgacggtggcacaggaaagacaaccttcgtgaagaggcatctcactggtgaattcgagaagaaatatgaaccgaacattggtgtggaggttcatccgttggattttttcacgaactgtggaaagattcgcttctattgttgggatactgctgggcaagagaagttt

SEQ ID NO: 26246 - DNA, 251 bp, Glycine max
  Clone ID: 701097929H1
cccatttctgtgaactgccatggctggaggtgttattcggcagttatttaggaggaaactccaatctcattctcctaattcttgcattaagtcattcattatcacaaagaaagatggtgctgactctattggcaacaactccttaagagtgcttgcactagttggagctggtgtctcagggtttctaggttttgcaacaacagcattcgctgatgaagctgagcatggcctggcatgtcctacctatccat

SEQ ID NO: 26247 - DNA, 263 bp, Glycine max
  Clone ID: 701097930H1
gtcggacttcggtcgggaattttgcgggtatttgtcagtgtgtgagagagagagcgagcagtttcagacacagagagaggggtttgggattggagggattgacgctgcgtctcttcctcttctctttcgatccatccctcattccttatcctccaatccaaccacctcagtctcacactcacatatacacatatctgaacgcgtatcgtccctcctatggcttcaaagcgcatcctcaaggagctcaaggacttgcagaaaga

SEQ ID NO: 26248 - DNA, 129 bp, Glycine max
  Clone ID: 701097934H1
ctcattgtccctgtcttttgtttggaggggaaaaaaagatattctttcttctttttgctgaaacccaataaagcgaaatcgcaaagcgtgtcttggaaaagggtggtttcattaaaaagcagggatctt

SEQ ID NO: 26249 - DNA, 247 bp, Glycine max
  Clone ID: 701097941H1
cctcagcgaatcggctcagatcgaccgccggctcggcctaatctcctcgccagggcaccatgaacgccgccgtgttgccccgccctcgccgctgcctgcgccctcacctaccgcgccgctatttccacggatccgggtcctcttcccgcaacctacatgcccgacgtcgaagacgctcagagccccatccacgagatcaaacgcaagggtggagatttgcgatattgccaaaagtgttctcactata

SEQ ID NO: 26250 - DNA, 245 bp, Glycine max
  Clone ID: 701097943H1
tgctgaggttattgctgatattgctctttgcccatttgaggctgtgaaggtccgtgtccaaactcagcctggttttgcaaggggtttgtctgatgggctcccaaaatttgtcagatctgaaggagccttagggctgtacaaggggttagtgcctctctggggacgacaaattccatacacaatgatgacttctgcttcttttgagaccattgttgagctgatctataagcatgccatcccaacac

SEQ ID NO: 26251 - DNA, 78 bp, Glycine max
  Clone ID: 701097945H1
gggagaaaaaccgatgcctcatcaatctccaaagagggagctatccccagatggcgtcgagtataattcacacaacat

SEQ ID NO: 26252 - DNA, 246 bp, Glycine max
  unsure at all n locations
  Clone ID: 701097947H1
tacgnagtccggagagacagccgatcaggacggcggcgagagacaagacgacggcaaggactaccaggagccggcgccggcgtcactggttgacccgacggagtttacgtcatggtccttttacagagcagggatagcagagtttgtggccacttttctgtttctatacatcactgtctaaaccgtcatgggagtcgccggggctaagtctaagtgcagtaccgttgggattcaaggatcgcttgg

SEQ ID NO: 26253 - DNA, 262 bp, Glycine max
  Clone ID: 701097948H1
aaatcaagccaatcagactgcttgcagcgtcaggaatcatggaatcatcatgaaagttgtgaactgagtccagtagagtctgatgaaagtcattctggtgagcaatttgataaaccagtattagcagaagacaaaggaaaaaaaggcatttgggaaaacaagttcgcacatgatccaggaaatcccccacgaagtttatcaggaaattatttctctgacatccgttttttgtgttgtggccctgagattgaatatgagaaag

SEQ ID NO: 26254 - DNA, 252 bp, Glycine max
  Clone ID: 701097949H1
gttttgcttcctctaatctggcgaatcattcgttctagcaaattttgccgaaaactccaaaacccccccttttagaaaactcgattaacaacaatctcaatcttctacagcttatcctctctctctctcttcttcgcttcccccaacagcaatttcattcaaaactctctctcaggtgattaagagaatcagagtttgcttatccatataacagatcatttgaacagaagagggagggtactggtttgcgga

SEQ ID NO: 26255 - DNA, 247 bp, Glycine max
  Clone ID: 701097950H1
cgcggcgttggcgtacgaccgcgccgcctaccggatgcgagggtcgagggcgctgctgaattttccgttgagggttaactacggagagccagatccggtgagggtgacgtcgaagcggtcgtcgtcgccggaaagtatggcggcggtctcgccgaagagaaagaaagttatggtggtggggacggtgcaagagcaagtggggagtcaagtggtgcagtgtacacgtggcgaacagttattggttagc

SEQ ID NO: 26256 - DNA, 107 bp, Glycine max
  Clone ID: 701097952H1
tacgtgaagtcggaattgggttcggcttgagaacgagtccaatttcgtttccattcgtttctgtcgattggacactgcctcttgtctctctcaattggcttttcttc

SEQ ID NO: 26257 - DNA, 247 bp, Glycine max
  Clone ID: 701097953H1
cgtgacttcacctgggaagttgtgaagccactcaagtcagagaagcctcaagttttggagtgttgttaagttaatcactcccttcagtggatgtcttgctgggtgtggatgaataatttgcgtgtttcatgactactactactactactccattcaatgtctaatgccatctcatcaatacctaaactgttcgtttttttttttctccctatactcacaatttattgtttggctatgcaatgttact

SEQ ID NO: 26258 - DNA, 134 bp, Glycine max
  Clone ID: 701097955H1
cccgctcgagctcgagccggtgagatttcaattgatgattagtatacaagtttctgtggtaactgataaccgtttgcttttgagctccctcaggtttcaattaaggatgtaaaattttcacatttaatctatag

SEQ ID NO: 26259 - DNA, 243 bp, Glycine max
  Clone ID: 701097956H1
aagagaacgggttttgaagaagaagcagttcaattgatcaagtcagatttcagggacctaagtctagctgctaatagactcgcccatcatgccatcaaacttggtggcattggctttggagcctcttttttcggattgtttgctgccattgctgctatttatctgttgattttggatcgtacaaactggaaaacaaatattctcacagcactactcattccatacattttcttcagcttgcct

SEQ ID NO: 26260 - DNA, 123 bp, Glycine max
  Clone ID: 701097958H1
ctttgcttctcaagtctctcgaagcctctttctctctcttctagaagctatctgagtatggtgttactaggagtcgaacaagcaaagtacatggttgatttggaaatccaggtatgcacccca

SEQ ID NO: 26261 - DNA, 185 bp, Glycine max
  Clone ID: 701097961H1
caatcacaagctctcatgatttcggtttagcaatagatggaccggtaaaagaccatacacatatcacgactcatgtgatgggtacacatggttatgctgcccctgagtacatcatgacaggccatttgacaaccatgagtgatgtatatatctttgtagttgttctcctagagctcctcacagga

SEQ ID NO: 26262 - DNA, 247 bp, Glycine max
  Clone ID: 701097911H1
ctatttatacgtaataattccaaaaagcctaacgcgagatcttcatcagtttttcaattattcctcgaattttgaaggaatcatacaaacgcttgacatattcgtcatcaacaacaacctcacgctgctatagattttttttttttctcttcttacagatccaaacatggccgaagaacaccgatgccaagctcccgaaggtcacagactctgctccaacaactgcggcttcttcggtagccccgcc

SEQ ID NO: 26263 - DNA, 258 bp, Glycine max
  Clone ID: 701097963H1
caggacaacgaaggaatccccccggaccagcaacgtctcattttcgccggtaagcaacttgaggacggccgtacccttgctgactacaacattcagaaggagagtactcttcacctcgtcctccgtctccgtggtggcatgcagatcttcgttaagacactcaccggcaagaccataaccctagaggttgaaagctccgacaccatcgataacttcaacgccaagatccaggacaaggagggtatccccccggaccag

SEQ ID NO: 26264 - DNA, 249 bp, Glycine max
  Clone ID: 701097966H1
cctaacctagttcttcttctgtctcggcacctctctcccctacacctgaaccctgttccatcctccaaccatggcgaaccaagacttcgaagagcgccaacagcagcaacaaccgcaggagctagggtacgactccgaattcgtccctcactcggtaaaatccttcgtggtccacctctaccgccacatccgcgagaagaacgtgtacgagatccaccagatgtacgagagctccttccagaccctctc

SEQ ID NO: 26265 - DNA, 242 bp, Glycine max
  Clone ID: 701097969H1
gccatcgctgaacgtgcagaaacgaggatcgcatacacatcatagacttccaaattgctcagggaactcaatggatgactcttcttcaagcgcttgccgcaagacctggcggtgctccccatgtgcggatcacagggattgatgatcctgtttccaaatatgctcgtggcgacggaccagaagttgttggcaaaaggttggccttgatgtctgagaaatttggcatcccagttgagtttcat

SEQ ID NO: 26266 - DNA, 185 bp, Glycine max
  Clone ID: 701097846H1
cgggcatctgcacactgaagagccacttgaagctgctggtaagaagacagaagagggaaatgtcctcattaaagctagtacatatgcaagagcttccaaaagctatgaaaggccgtgaagtacatagaatatgattcctcctttggtgaggaggagaaaaagcaggcccagaccttgaaggttgc

SEQ ID NO: 26267 - DNA, 77 bp, Glycine max
  Clone ID: 701097847H1
acagctaccttcccaatgctccataggtgcttaagggcatcacttgtacttttaaagacggtagaagagtgggagtc

SEQ ID NO: 26268 - DNA, 200 bp, Glycine max
  Clone ID: 701097848H1
caatttaaaaacccaaaaggattaaaaacacaggggcacatggttctaagggccgccgttgccctaccatcttcaaattatcctattgctctttctttcacgttttcctggttttaagcccttccagtgccctatttaggcttatacccttctggtaatgatagcttccattcggcgtcaccagaaagccgaagctcttg

SEQ ID NO: 26269 - DNA, 182 bp, Glycine max
  Clone ID: 701097849H1
cggattcggctcgcttcgagcgaatcggctcgagcaattatttagatccattgatgattgagctgcttttgggctcccacagactcctgaagacgctgccagagcggagcttgtccatgggaaggataatataatagatcgtagtcttccggatgcttatgttaatgccattcgacgtgcga

SEQ ID NO: 26270 - DNA, 175 bp, Glycine max
  Clone ID: 701097854H1
cttctttttctctaagtctaaggggtgccctgagatcactttgagcccttttgaaggctgtggcagttcttggcagcagcgagggtgtcactggaacattttcttcactcaggagggacatggtccaaccaccgtaactggatctcgtgctggtcttaagcctggtctccatggc

SEQ ID NO: 26271 - DNA, 188 bp, Glycine max
  Clone ID: 701097857H1
ctggagatttgcaaaagcgcattgggataacatctggtatctgtactttgatccaaaacaaagctgaaaagaaaggggacaggtatgaagcaatcttcagcttctactttggagactatggtcacatagcagtgcagggaccttacctgacctatgaggacacatatttggctgtgcctggtgggtct

SEQ ID NO: 26272 - DNA, 180 bp, Glycine max
  Clone ID: 701097859H1
tgaaatccccaaaatagtgtttccaaattcctctgcccatcaaagggtgctcgtgatcggaatgggatctgcccctgacttcacatgcaagacagacataaggaggctatcattgaggccgtgaaacagggttacagacacttcgacaccgtgctgcctatggctctgacaaggtctcgg

SEQ ID NO: 26273 - DNA, 188 bp, Glycine max
  unsure at all n locations
  Clone ID: 701097862H1
cgtttctctctctagatctctgtttcttctttttctccaaccttcgtttcaccaccacacttacattcatctcgtcgaaatggctccaccatttgagaccccaaacaagtttccagctatcaacagtccccaaaccctcgtcttaacgagatgantctttcatccatttccaggagacacgttgctgc

SEQ ID NO: 26274 - DNA, 193 bp, Glycine max
  Clone ID: 701097864H1
tctcgtttcgcaaatccaaggaggagaatggaggtttttttgtgtatgtcacccttgtgctgtgcggttgctctgctggtaaggtgtgcacaaacattcctactcgatcaccatcctaaggtaccagcttttgacatccatgaatgaacggttggaggaagaggccatgtctcaccttcatttgacgccaacg

SEQ ID NO: 26275 - DNA, 187 bp, Glycine max
  Clone ID: 701097870H1
ggcaagaatgagttcggtgagcaattgatatcccatgttgatacattcagcaaagacctgttcgtttcattgaaaggggatgatgtacagcaagccagtcccgctgtcgaatacttggagaatgctcttggtaaatttgatgatgggccattcttgcttggccaattcagtttggtggatattgctt

SEQ ID NO: 26276 - DNA, 178 bp, Glycine max
  Clone ID: 701097872H1
ctgctatctcatggggagcagtgcgggggccacaatcgcctacttcgcgggtctacgcgcgaccgacacggcgagcgatctctcgccgttgaagatcagagggctgtattgcggcaggtgtttttcggtgggacccagaggagcaaatccgaggttaggctggagaacgacgaggttc

SEQ ID NO: 26277 - DNA, 117 bp, Glycine max
  Clone ID: 701097873H1
tgatcgtgatgaaaggaagctagtttctggactgatacagatgcgggtacatcggtgtaatggagagcagactgcaaattctgtcattgatatatgaatcagcaacatatgtgtata

SEQ ID NO: 26278 - DNA, 104 bp, Glycine max
  Clone ID: 701097879H1
aactggcgttgcagcatatatcactcactgcaacctttagacacctcacttgctgctagctttgcagaatgacatgactgtctgcattccggtctctaaccttg

SEQ ID NO: 26279 - DNA, 193 bp, Glycine max
  Clone ID: 701097880H1
gttggcaaaagtggagatgggactctgtctgtttgcaatcttcgaagaaataaagtgcaagctcaatctgaattttctgaagatgagctactgtctgtggttttactgagcgctcgatttactgatctctcttctacttctattgatgctacgttgaagcttgatgaagacaggattattaccggatcagagc

SEQ ID NO: 26280 - DNA, 189 bp, Glycine max
  Clone ID: 701097881H1
cgtgagtgtgacacagataacatagggacatgctattgagactggtcaaaagcttgtcacccaaggttgtgacccttgttgagcaagaatccaacaccaacacttctccctttttccaaaggtttgttgagaccttgagttactactctgctatgtttgagtccatagatgtggccctccccagagatg

SEQ ID NO: 26281 - DNA, 137 bp, Glycine max
  Clone ID: 701097882H1
aaggtttttgcatctcagaccatcttacaggcgatggtcccagtccggttcacccaatcgaagcctcatccatgactgagcatgcatttcagaatagaagcccacattaactctgatggatacgcagggcatgcccg

SEQ ID NO: 26282 - DNA, 169 bp, Glycine max
  Clone ID: 701097885H1
tttgggttgtatgtactacacactttgatgtcactgttatgtggagctccaacaagtggtatgggctgcaatttacaaaacacaacaacttgatggtgcaaaatatatcctttggatgtgtaatttgtcccgtgatttgtttcattgtttgggtatatgaggtgaaaag

SEQ ID NO: 26283 - DNA, 154 bp, Glycine max
  Clone ID: 701097887H1
cgggcctcctcgttgctcatcttcaccgaaccaaccacctcaacaattttccaaaccaaaacctcaatagagagccacaaatttttcagaggccatatggacagagaacaagaagagatgcaatttcttcggctctttgcactatacaagtgat

SEQ ID NO: 26284 - DNA, 183 bp, Glycine max
  Clone ID: 701097889H1
ctgctcgagctcgagccgatttgcactgtttgtaggtgtctccgtcgcagccaacatctcgggtggccatttcgtacccagctgttacttttggattggcattggaggcaacatcaccctcattactggtttcttatactggattgcccagttgttgggttccattgtggcatgcctcctcct

SEQ ID NO: 26285 - DNA, 174 bp, Glycine max
  Clone ID: 701097893H1
caaaaacaagacagtgttcgttgaatctcttgaaagtggtgacttgatttgatttattcacataacccatttatcatctctccgatctttctctggattctacttctggacctcgcgtcttgctgccgcttcacgccaatacactgttcagcatcaccatccaaattctcactt

SEQ ID NO: 26286 - DNA, 186 bp, Glycine max
  Clone ID: 701097894H1
cgctcaactctcttcacctgctcctgttcctgtatcctctgagaagccacaacctccagctgcaagattgaatactgatgatctttgccgcagaactgtctctctctagaagaatatttcagtgttcggcttttggaagaggcattacagtgtgtggaggaattaaaatctccttcttaccacctg

SEQ ID NO: 26287 - DNA, 193 bp, Glycine max
  Clone ID: 701097896H1
ctcaaatctgcaaactaggctttttcccaacgggttcagtttattcaagttttacaatttcgtggctctgaaactattagatggggaattgtttgcgcaaggctctgcggatgatgattctgatcatattgtggagcttgcttctgggaatgtgcaacttattactaccacagaatcttgggacccaaagttg

SEQ ID NO: 26288 - DNA, 222 bp, Glycine max
  Clone ID: 701097903H1
atcaaacaatatgaacaggagagtggagaggtagaacaaggattgaagttgttgctgtgagaacagagaaagagtgaaatcggagtttgcggaggacttgcaatcaatggatgtgataagagacgcagctaatctcatgtcgaccaatcgagacaggtggtggttcaccctctggtgcttctcagcatcgtcgacaactacaacagagtcgccaaagacact

SEQ ID NO: 26289 - DNA, 190 bp, Glycine max
  Clone ID: 701097845H1
gaaaaaccaagtaatactagccaaaatatgtctcccaaatacatgtcccttttcctcctagtaatactagggatggcttttctggccactacttcccttgctgatcgtcgttttctttcggtggaagatggtcatgatcaccatcaccaccacccaccaaaaaaacactggcctccaaccacacaaaatg

SEQ ID NO: 26290 - DNA, 253 bp, Glycine max
  Clone ID: 701097904H1
gcgattactcagaaagctatctcatcatcgactccttacaatgatcagttcagggaacttctgcaagcagggaaagacattgaaagtgcatattgggaacttgtagtgaaggatatccaagatgcttgcaaattatttgaaccaatctatgatcaaacagatggtggtgatggctatgtttctgttgaagtatctcccaggctcgctgatgaacctgagggaaccatagcagctgcaaaatggcttcataaag

SEQ ID NO: 26291 - DNA, 251 bp, Glycine max
  Clone ID: 701097905H1
agcgagagcaaaaccctagttcatccatcaccagtcgaggaagaagatggtgaagttccttaagcccaacaaggctgtcatcgtcctgcagggccgctacgccgggcgcaaggcggtgatcgtgaggcccttcgacgagggaaccagggagcgccccacgggccactgcctcgtcgccggaatcaagaagtaccccagcaaggtcatcaagaaggactccgccaagaagacggccaagaaatctagggtta

SEQ ID NO: 26292 - DNA, 251 bp, Glycine max
  Clone ID: 701097906H1
cagaatcaattgagaatggggatccgattcgtactgatggtgaacaagcaaggccaaactcgtcttgctcaatactacgaatatctcaccctcgaagagcgacgtgccctcgaaggcgaaatcgttcgcaaatgcctcgcccgcaacgaacagcagtgttccttcgttgagcatcgcaactacaaaattgtatatcgtcgctacgcctctttgttttccctcgttggagttgacgatgatgagaatgagct

SEQ ID NO: 26293 - DNA, 251 bp, Glycine max
  Clone ID: 701097907H1
cggatccgggtatggtgggagacagcaagaatctgaatatggatccgggtatggaggcaggaaggaggaaccagaatatggatccggatatggtggaaggaaggaggaatctgaatatggatcaggatatggaggaaggaagcaagaatcagaatatggatccgggtatggtggaagaaaggaggagagtgaatatggatccgggtatggagggaggagtgagtatgaggagaaacctagctatgggagga

SEQ ID NO: 26294 - DNA, 250 bp, Glycine max
  Clone ID: 701097908H1
cgcggattggatgttcgtcaacacctttgaagcattggaaagcgaggtgttgaaaggcttaacggagctctttccggcaaagatgataggaccaatggtcccttctggttacttggatgggagccttaaaggggacaaagggtatggagcaagtctatggaagccgctaactgaagagtgcagcaattggttggaatcaaagcctcctcagtctgtagtgtacatctcctttggaagcatggtgtcattg

SEQ ID NO: 26295 - DNA, 249 bp, Glycine max
  Clone ID: 701097909H1
cctcttgttgttgcctatgcccttgctggcacagtggacattgactttgacactgaacccattgggatagggaaggatggaacagagatcttcttcaaggatatttggccatccagtgaagaaatagcaaatgttgtacaatcaagtgtgctgcctgatatgtttagggacacatataatgcaatcacccaagggaatcccatgtggaataatttatctgttccaacgggcactctttatgcttgggac

SEQ ID NO: 26296 - DNA, 60 bp, Glycine max
  Clone ID: 701097742H1
tatcgagccggaaaaaactgatacaaagatctagtcatatctagtatcgaacaggggcga

SEQ ID NO: 26297 - DNA, 153 bp, Glycine max
  unsure at all n locations
  Clone ID: 701097743H1
ctcattctagctttcctctccgaaccctcgatcactctcacgcgctcctatattcgatcctccaccgtcgctctatcgaaggaaaanaanannatcttcatcacatggcgaaagaagcatctggtgtggcagtccatgatgactgcaagttga

SEQ ID NO: 26298 - DNA, 129 bp, Glycine max
  Clone ID: 701097744H1
ggaacactcattatcctcttctctaacaaagccatagtacgacgcttttagttcattagttcttcttatcctatggataccattcgtaccagcaccatcacccgcgtgcaacagagaagcccaacagag

SEQ ID NO: 26299 - DNA, 149 bp, Glycine max
  Clone ID: 701097748H1
atctctctctctcttaaaccatcatgtcctccaccgcgcctcccgtcctccccatctccaacccccaaaccaccgcgggaaccaccggtgcaggccgcggcgccatcgaggctccggccaacaacccggccttccgcgctttcatcaac

SEQ ID NO: 26300 - DNA, 137 bp, Glycine max
  Clone ID: 701097750H1
tttcaaacagtcggtaactctttcttttcttttctttctttctccgatcgcatcgctcgcaaccacaatcatgccttcccgaagaagaactctcttgaaggtcatgattctcggtgacagcgggggtggggaagacg

SEQ ID NO: 26301 - DNA, 120 bp, Glycine max
  Clone ID: 701097752H1
tcgcttatcatattcttcactctctttgcctctcaatgtggttttttcaacaagggttattattaggtgaagatgatgatggtgcatcctcgtgatcaagtaggtggagagacacacaag

SEQ ID NO: 26302 - DNA, 149 bp, Glycine max
  Clone ID: 701097756H1
caacgacctcgttttgagtcggaggaagagtacttggctctgtgcctcatcatgcttgcacaaagcggtaacaacaacaacacccaattaccgtcttcgtcacagtcacacaaagaagcgtcaccgccgctgaaactatcacacaggtg

SEQ ID NO: 26303 - DNA, 145 bp, Glycine max
  Clone ID: 701097758H1
cctcaggttgattctatttgtctgatggccatcttgcacgtcctgatcttattgtgttcaagtgacggacaaatccagacaggaaagagagatttgaaatgtacatgccaagcaaatgtgcaaagtacagtcaatttttagtgat

SEQ ID NO: 26304 - DNA, 58 bp, Glycine max
  Clone ID: 701097760H1
ctcgagccgctcaagccgaatcggctcgagcaaattttgtcttgcagactggaatcgg

SEQ ID NO: 26305 - DNA, 132 bp, Glycine max
  Clone ID: 701097761H1
aaggaaacgtattaaaccagaccctagaactagcatcagatcaaaaccaacgcgattgcgcgatcaaaaggtctgtgttctctctcgatcctcgcgaaacgcgctttttcgctcaccctttcttcatcttcc

SEQ ID NO: 26306 - DNA, 156 bp, Glycine max
  Clone ID: 701097764H1
tcattttgtacaagcgatgcaggaggggtttaacgaaccacttcatgggaaaatcgaagtcattcacggatctatcacaagtgaacacactcaacacagtgaatgaacttcaaaagcaagagaaacctttcaacaagagaagaagggttcaaatag

SEQ ID NO: 26307 - DNA, 145 bp, Glycine max
  Clone ID: 701097767H1
catcgtttctctctctagatctctgtttcttctttttctccaaccttcgtttcaccaccacacttacattactttgtcgaaatggctccagcaattgagaccccaaacaaggcttccagctatcaacagtccccataccctcgtc

SEQ ID NO: 26308 - DNA, 114 bp, Glycine max
  Clone ID: 701097771H1
cctcgagccgaatcggctcgagcggctcgaggtaccctcctacaatcacaattcataatatgaacaacctatctcacctcttaaatattctgaatcggtttccacataacatac

SEQ ID NO: 26309 - DNA, 168 bp, Glycine max
  Clone ID: 701097773H1
tcggctcgagctgcctatgaatatccttgatcatgaacgaataatttgttttggtgatctgaattatcgtatcaacttatcaaatgtggaaacaaaagctcttatctcaaaaaaacagtggtcaaaattggttgagaaagaccagctcatgctagaactcaagatcgg

SEQ ID NO: 26310 - DNA, 79 bp, Glycine max
  Clone ID: 701097776H1
ctcgttttcaatatgcagatcttcgtcaaaactctaaccggtaaaacgattacgctagaggtcgagtcctccacacaat

SEQ ID NO: 26311 - DNA, 148 bp, Glycine max
  Clone ID: 701097780H1
gttgatgtgagattccccagaccagatagatcaatgagacttgataaccaccacattgaaattgagagacaattgaaggatgtcaaatggaagaaagaaaagattatggaggaattaaaaagggaacaaatattgttggacacgacga

SEQ ID NO: 26312 - DNA, 159 bp, Glycine max
  Clone ID: 701097781H1
cggctcgagagaagaagaagatggagaagtatcagatctggagcaggagaatagcgttggcagcgcttgcctttgctctgctgttccaatcggcctcagcagaccgacgtcgttgtggtctctgaagataacttcgagaaggcagttggtcaggacaga

SEQ ID NO: 26313 - DNA, 136 bp, Glycine max
  Clone ID: 701097782H1
ctcaaatctcaagtaagtatcgctctcgccccatggcagacgcaataggcgcgcaacactgcaacagctgacttcgtttcaatttcaacgacgcccttaaccagtttcagggccaaccagctgcagctccagcatc

SEQ ID NO: 26314 - DNA, 112 bp, Glycine max
  Clone ID: 701097783H1
actcgagccgaatcggctcgagatattagggcacactttgagatggtcaataggatggtgtagactgtatgtggtgtctgcaagctaggcctgagttgaggcccactatggg

SEQ ID NO: 26315 - DNA, 114 bp, Glycine max
  Clone ID: 701097784H1
atgaaaactaaggaaggaaggaagagtgagcgtgacagatgcctttggcgaggctttcaaggtctcgaacgctcgacgttgctattgacaatgggcaaatcatttttcaatctc

SEQ ID NO: 26316 - DNA, 126 bp, Glycine max
  Clone ID: 701097789H1
aaacgaaattctttccctttgacaactgcaatctaaggtagacataacaaacacaacatgggttctatgggcacaatcaacaagccacatgctgtgtgcataccgtacccagcacaaggccacata

SEQ ID NO: 26317 - DNA, 128 bp, Glycine max
  Clone ID: 701097791H1
cccaatttgaattgttccattttcatttctttcgcaaaagtcgcaactacttcctcagaaaacaagtttctaagttaaggaaatccagagagatcacaatcgccggccacggtccagctacatgcata

SEQ ID NO: 26318 - DNA, 144 bp, Glycine max
  Clone ID: 701097792H1
ctccttctgtccgctgcgactctctttccttccctctttttccgaatctgaatcgaaatggcttcggagactgagacgtttgcttttcaggccgagatcaaccagctcctcagtctaatcatcaacaccttccacacaacatac

SEQ ID NO: 26319 - DNA, 140 bp, Glycine max
  Clone ID: 701097794H1
gcagctcccacaagaaccagacagggacgagggggaagtagcaggtcagaggtaccgtgtgggctatgtccgcgaaggcaagacagtcgaaagcttgcattcaaccctcacgccgcgatcacgccaaacaagacaggcat

SEQ ID NO: 26320 - DNA, 199 bp, Glycine max
  Clone ID: 701097813H1
taggaggagaaaggctcaataggcagaagcatcaccataaagcaagacacttttttcctcttcattccttccttcaccttcttcgttgcttgcggtgccctagattttctctatcctttcaatcgttcccgaattccctcccgctaggctttcccatggattccgaggacgatatgcacgacgccaacgctgtggagtc

SEQ ID NO: 26321 - DNA, 187 bp, Glycine max
  Clone ID: 701097815H1
tcgtccttgaaatatgctcacaactgctatacttaacaattcccaacatactagagcatcctggattaataaatactacgattttcttgtgatgcgcaccaattgcaaaacgactaggatgggcccacttctatcatcttgaaaaaagcaccaagatgccctggttgtctaataaccattcagcaga

SEQ ID NO: 26322 - DNA, 154 bp, Glycine max
  Clone ID: 701097741H1
tcgaggattcaatttattggcagttaaaggatggtctctcacctgaggctgaggttgtttatgtgggatctctcaaggctgatgttgatgcaaatgagcaagagaaagtttcccttcagttgctggatggaatcaattgcgtgcctacttttat

SEQ ID NO: 26323 - DNA, 196 bp, Glycine max
  Clone ID: 701097816H1
ttcaccgcacgaatatcttgttgtttggagcgatccgagaaaaactctgtaaacatgttggtttaccaggacctccttacaggtgatgagcttctctctgactccttccgttacaaggaaattgagaatggaatgctgtgggaagttgaggggaagtgggttgttaaaggagcagttgatgtagacattggtgcaa

SEQ ID NO: 26324 - DNA, 61 bp, Glycine max
  Clone ID: 701097819H1
ttcggctcgcgctaatcttaagtggaaccttctgcgaaattagccttccttcgtcccttga

SEQ ID NO: 26325 - DNA, 185 bp, Glycine max
  Clone ID: 701097822H1
attgactccaggcatttggctgagaatttgaagaatacggtgaagaacgttgtgagccaagttgctaagcggactctcaccacaggtgtcaatggatagcttcacccttcaaggttttgtgcgaaggacttgctcaaggttgttgatagggagtacacatttgcatagattgatgacccctgcag

SEQ ID NO: 26326 - DNA, 163 bp, Glycine max
  Clone ID: 701097823H1
tagctggttataacccgctaaaatcgccgtcggaacactgttcatcggagagaggatcctctgcgaccacgttttcgctgaggatcggggacaaaaatagcggaatcacatttaccacatacccaattgagcttcagagtcacgtcacacaaggatcctgaaa

SEQ ID NO: 26327 - DNA, 189 bp, Glycine max
  Clone ID: 701097824H1
attgctatctcatggggagcagtgcgggggccacaatcgcctacttcgcgggtctacgcgcgaccgacacggcgagcgatctctcgccgttgaagatcagagggctgtattgcggcaggtgtttttcggtgggacccagaggagcaaatccgaggttaggctggagaacgacgaggttccttcgctgtg

SEQ ID NO: 26328 - DNA, 90 bp, Glycine max
  Clone ID: 701097825H1
acgaggataacaataactgccaactcaaccacgacgacgctatgatgacgcacgacaggcacacggagatcgcgcaagcccagaatagga

SEQ ID NO: 26329 - DNA, 191 bp, Glycine max
  Clone ID: 701097829H1
ggcggactgcagcagcggggaaattctaatgctggaagccccagcgtcttacggtaggtctagcgattccgacgcggaaataatcgacgcattgccttatatcgacgacgctacgcagaccccagagtcaaactggaggttgaccgtctcgtggaggatgagatgcgtcgcagcaccaagaagcccaccga

SEQ ID NO: 26330 - DNA, 200 bp, Glycine max
  unsure at all n locations
  Clone ID: 701097831H1
aagttgacatcacctgcaaatgtatttacctttggcaacaattcaaatcaaaataacggccctgctgcttcaagccctacattttcctctccattcccccctctgacaaacaatctacgggtcagaatatattcagtagctcatcncttgcaggctgcatcagcagctctagtgcaaatgtaacctccactagcactgac

SEQ ID NO: 26331 - DNA, 195 bp, Glycine max
  Clone ID: 701097833H1
ctcgaggcctgaaagtgaacagagatgtatgttctgtcgaagtactaaaaggagggagaatgcgatcacttctcaatttagaaaagagggaacgctctcttaattatgagggactagacaagggatttctcatggaaggatatcatcagttcatgtgctccctttcagtgggagagcacattctatattcactga

SEQ ID NO: 26332 - DNA, 168 bp, Glycine max
  Clone ID: 701097834H1
gtaatgaagcgtgaaacaaaggctcctacctgcttaaaataatatggcattcattaattgttagacactgctatatatattttgcgcagaactgcaatatcaaaggctccacctgccacatgatcgacgaaatctccaggagatcattgtacgctaaccaccgcgttg

SEQ ID NO: 26333 - DNA, 78 bp, Glycine max
  Clone ID: 701097840H1
ctcgagccgttcggttcagcaacaacgtgatcggactcctgaagttcctgaccttcctcctacccatcccgatcgtgg

SEQ ID NO: 26334 - DNA, 79 bp, Glycine max
  Clone ID: 701097687H1
gggggaacaagttctttcttttattattgtgaaagagatggtggccccgcaaattgaaaggacaatgactgagcagttg

SEQ ID NO: 26335 - DNA, 177 bp, Glycine max
  Clone ID: 701097688H1
gtttcttttaagatatttttggtcacatagtttatggtctgcctctgcgtagtgcttcaacagccccctgctcgctcgatcatcttgattattttttaagccttttaaatgcccaacatcttgttcttgatgtttgagattgatgtatccaattccttagtgaatcttcctttccgg

SEQ ID NO: 26336 - DNA, 204 bp, Glycine max
  Clone ID: 701097689H1
tataaacctgattataacagattactgcatgccaggaatgactggctatgatctgctgagaaaaatcaaggaatctaaatctcttagaaacataccagttgtgattatgtcctcagagaatgtagcatcaaggatcaacagatgcttggaagagggagcaggagagttctttctgaaaccagttcaacaggcagatgtggacaa

SEQ ID NO: 26337 - DNA, 169 bp, Glycine max
  Clone ID: 701097690H1
tctcagaatccaaaccctaggaaatttccccttcagacgaaaccctagatttcctctcacaaatctctctcagcttccccattctcgggattcggcgtccagatcacagatcccgttcaatttgttttccgcatcccccgatcgggtttggattctgaagaaaagttcc

SEQ ID NO: 26338 - DNA, 256 bp, Glycine max
  Clone ID: 701097693H1
tactagggttcagaaacgaaaaagggttcggtgttctgttcgcgatgagagccaagtggaagaagaagcgtatgaggaggttgaagacgaagcgccgaaagatgagacagagatccaagtagtgcgttaaacctagtttgtttctgttgcttttacaattgcttatgttgtcgaatgggacacccagttgttagtggcactggtttctcctttttgatgtctgatacatttggttggattcaagtagtttatgttc

SEQ ID NO: 26339 - DNA, 243 bp, Glycine max
  Clone ID: 701097694H1
attcaacagacacagactgtatcagcggttccctgcacctcctgagtactcttctcgactcggagctcccgagcgtgagaaacttcaaaggaaaatggtcactccgccgagtcaaactcactcaattcgaaacccacctcaccgatttctccgacgagttcccaaacgcctccacatcgaaccccctctacctacacttcctcgactcaatatcgcaaaccctcaacgacgccgtttcgctct

SEQ ID NO: 26340 - DNA, 265 bp, Glycine max
  Clone ID: 701097695H1
cggctcgatggcaattaacgagtatatatggacatatgctgctcttgagtttgcacttgtggctttaactgtgcatctattttatactatgttgcatttgacagccatatatgccatactactttcatcagttttgggttttggaattgctatgggcatcaactacgcatatattcagtctgtcacttggagacttcaggtttctcatgatgataacccagtatgaatctcctcacaagggaaacaacttcatgaatttgttttc

SEQ ID NO: 26341 - DNA, 143 bp, Glycine max
  Clone ID: 701097703H1
tgtatgcatggtggactctctcctgagttacacaatctgaatcagataaagagtttgccgcgtcctattgaagtgcctgaaactggtctactatgtgcactcctttggtctgatcctagtagtgacattcggggttggggaga

SEQ ID NO: 26342 - DNA, 162 bp, Glycine max
  Clone ID: 701097704H1
ctctgtttctgtctctgtgtttgcggctgaggattccgaacgagcgaccttcttcgtttctcgcaaagtttaagtcatcatgggtaaggaaaagactcacatcaacattgtcgtcattggacatgtcgactctgggaagtcaactacaactggtcatttgat

SEQ ID NO: 26343 - DNA, 150 bp, Glycine max
  unsure at all n locations
  Clone ID: 701097705H1
attttggttctgtctttatttntctttttcatgtaagcaaaagaacgaattagagtgggaagacgatccaactcggacccgttatcttcattctattcaaccgatcctctctttttcttgtccnagcagatagggcatggcaacagatga

SEQ ID NO: 26344 - DNA, 101 bp, Glycine max
  Clone ID: 701097706H1
ataaaccaccaccggagacaaaaccagatcccccttacttccagcgacaagcccgctggctgtcgctcttgattttgtctctctaaaccagatccgaacaa

SEQ ID NO: 26345 - DNA, 157 bp, Glycine max
  Clone ID: 701097707H1
gttttggagtcatcctatgggagcttgccactctaaggttgccgtggagtgaaatgaatactatgcaagttgttggtgccgttggtttccaaaaccgtagacttgatattccgaaggaagtcgatcctatagttgcaagaataatctgggagtgttg

SEQ ID NO: 26346 - DNA, 161 bp, Glycine max
  Clone ID: 701097708H1
ctcattccattcacattctcaacccaacacacaacttccaaccatattctctcgccacttcctcacatggacgcaaagagaaccctagagctcacggttttatcgttggaggagctccacgtggactggaagcacgccgcggagagcctctacgtggtggt

SEQ ID NO: 26347 - DNA, 150 bp, Glycine max
  Clone ID: 701097709H1
gaagaaacaaagagaagggaaatatcaggaggtgcgagtaccggagccaaacgcgggtgtgtgtgtgtgtgagggagagagagatgcagttccattcagaaactccaaactaaacatccctggcgacaaccttaggaatctcgatcgctg

SEQ ID NO: 26348 - DNA, 157 bp, Glycine max
  unsure at all n locations
  Clone ID: 701097711H1
cattggccaattcggccactcgtctctgaaaaagcctccagcctccttcttcatccatcttccctctccaccaaaatcatgagggggncgnnccgntattcatcgaaccggtctctcaagtctcgtacttggcttagttcacaactcgaaacttcac

SEQ ID NO: 26349 - DNA, 155 bp, Glycine max
  Clone ID: 701097712H1
ccacacacaaacagaggctacgtacgatcaaattaattaagatggcggaagtgaggaacaaacaactggttctgagggactatgtgagtggttttcctaaggaatccgacatgaacatagttgaaggaaccacaatattgaagcttccacaaggt

SEQ ID NO: 26350 - DNA, 154 bp, Glycine max
  Clone ID: 701097713H1
cttgaatctcattctctatctgaatctttttggattattactgattttgttagttgctgtattgatacttgttcatttctttgagaaagcctatacaatccttggagaagggaagaaaaggagagtactggtaacattggaggggaacaacaat

SEQ ID NO: 26351 - DNA, 154 bp, Glycine max
  Clone ID: 701097714H1
ccgatggtgctaatcaacgtggtcgtcgtttgcttgggaaataggggtgtatatcatgagatcgatactaatttttaatatgcattagtcaatcaaaggagcttccaatgttccaggatactgatttcaaatatagtaatgtacaatacgcttg

SEQ ID NO: 26352 - DNA, 154 bp, Glycine max
  Clone ID: 701097715H1
atgaagcagtgtcagctataatttttgctagtcgtgataagaggcaaactgcctcattaactttctctgagctatatggagcagtgacaatgaataatgtgctttgcctatcagttttcttggcgcttgtctatgcgaggggattgacatggga

SEQ ID NO: 26353 - DNA, 160 bp, Glycine max
  Clone ID: 701097716H1
agacgagatgtgcaagacatcttcaaattgactccccacgataagcaagtgatgatgttttcagctacactcagtaaagagatccgacctggttggaagacatttatgcaagatcccatgggaatttatgtcgatgatgaggccaaattgactcttcatg

SEQ ID NO: 26354 - DNA, 119 bp, Glycine max
  Clone ID: 701097718H1
ctcgagccgtgttgttctaaagcactcatccacacattctccgtcgccacgacaacaatggctccaaagaaaggtgcgaaacgtcgagttgtagcagcagagaagaaggttcaagagaa

SEQ ID NO: 26355 - DNA, 158 bp, Glycine max
  Clone ID: 701097719H1
ggcatgaacagctgcaatgttggtgcctcaactttagaggaagggtcactgttgcctctgtcaagaattttcagctgattgcctcaacaccgccagcagccgttgctcctacaggaacaggacctacaccatctcagccaacacagtcttcttctgac

SEQ ID NO: 26356 - DNA, 144 bp, Glycine max
  Clone ID: 701097722H1
cgaggatttcaactttaggctccatctagaaaaaatggctggtttggctagcaatcttccactaattgttatgataggtctgcaaattcattatgcagcacgggccatattcacaagagtcgctctcttagatggggtgagtac

SEQ ID NO: 26357 - DNA, 156 bp, Glycine max
  Clone ID: 701097723H1
ggactattcaattctctatatttaacctctttccctcattctcttctttcactttcacttcctcatggcatcaacaaagagcatgttcatgtccttcgccatcctcctcctcctcgctctcttctgcgccaccgtgtcagctcagggctctccaac

SEQ ID NO: 26358 - DNA, 145 bp, Glycine max
  Clone ID: 701097724H1
ctgactcgtcaaggaagacatcctaatttcattcgctttaactcagtctgcctcgccggaagttgtataacgcctcagagaccggaaaacttaaaattcgacgcctcgtcggaaaaccggctgctatagcgcgcgaccaccgaat

SEQ ID NO: 26359 - DNA, 257 bp, Glycine max
  Clone ID: 701097686H1
tgagatcgcagtcgcagcgtgtggtgcaggaacaagaagaagcagagtgtgtcggcgacagcatgcgacagagttgttgggccaacatgccccaagagcttctccgagaagtcctcttcagaatccaggcctccgaggacgcgttgccgccgcggaagaacgttttcgcctgcggcggcggttggcggaacttgggaccaatcaacataggccttgtcaaaacaaccggaatcttcttcaagatcaactttcccaat

SEQ ID NO: 26360 - DNA, 151 bp, Glycine max
  Clone ID: 701097727H1
ccagcttcaatctcagatgcagcaacaacaacaaaaccttctgcaaccaaatcagttgcaatcttctcagcaatccattatgcaaacttcatctgttatgcagccatccatgatgcaaacatcttctctatctagcattccacacaacata

SEQ ID NO: 26361 - DNA, 155 bp, Glycine max
  Clone ID: 701097728H1
atccttcttttcttcttatgacatccaagtgcatgattagaaatcaggtgaaaaatcttttttgagacaaaagtacttttataaaagtatcagaaattttatttttgtttttattcgttggattgcattggaatgcgtatcataataatttcaag

SEQ ID NO: 26362 - DNA, 106 bp, Glycine max
  Clone ID: 701097730H1
ctcgagcgggtcctaggttccgctatttcgccctcctgtcgcggacatcaactttgtaggctcgccttagaaacaaatactctcttctttttggcgggggtgagag

SEQ ID NO: 26363 - DNA, 159 bp, Glycine max
  Clone ID: 701097731H1
aatgtttcttatttcttcctttcatatatattcaaaatttcaaatcaaatgaaacagcttttgtgttaaatatagaggaaacatggttataaattgattgtctcctcataagtcttctgaaccctttcagaaatgaatttaaggggaagaaccacacaa

SEQ ID NO: 26364 - DNA, 158 bp, Glycine max
  unsure at all n locations
  Clone ID: 701097732H1
cattctttcagcctcccttcaacaccctttacgatccccanncttccaagtctcnaatcgaatctcgaagacctgcgaagaacttaagggttgtttaaattctgtgtggttgttgttggaggttgaaatacaagttgccgcctcaagtgtgtgttaat

SEQ ID NO: 26365 - DNA, 160 bp, Glycine max
  Clone ID: 701097733H1
actcgagccgattcggctcgagtcacaacctagcttgcccacaccaccatcacaacacaaaccattcctctcttgcatttaaacaaaaataaatatagattctgggggcatttcttggattctggttctcgttggtcacatccatcaaacacccctttga

SEQ ID NO: 26366 - DNA, 161 bp, Glycine max
  Clone ID: 701097734H1
gtagattcaaggaacatgcttagaaaactgccaagcccacccatattctctcaaaactttcaaccatgaactgaacaacaacaacaacaacaacagggccacccgtacagacccacctccaaagagatcattttattaccaattttccgattcacagagaa

SEQ ID NO: 26367 - DNA, 100 bp, Glycine max
  Clone ID: 701097735H1
tgataagatactttgtatgcatggtggactctctcctgagttacacaatcatgaatcagataaagagtttgccgcgtcctattgaagtgcctgaaatggg

SEQ ID NO: 26368 - DNA, 138 bp, Glycine max
  Clone ID: 701097737H1
attttggttctgtctttatttttctttttcatgtaagcaagagaacgaattagtgtggtaagacgatccaactcggacccgttatcttcattctattcaagcgatcctcgctttttcttgtcagagcagatagggcat

SEQ ID NO: 26369 - DNA, 121 bp, Glycine max
  Clone ID: 701097739H1
tctcgagccgaatcggctcgagtcgcctcttcgacttccttgtccaactcgaggctacgacgcaccagcaagttggcgtctcttaccgagaagctggatgtgttggagcggaggttggagc

SEQ ID NO: 26370 - DNA, 155 bp, Glycine max
  Clone ID: 701097740H1
ctaagagattaatctatggaagagaagaaccatggcaccacctaggcctcttcagttgaatcccgtgcttacggccaaatgattcttttactcattcaaatttctagattttccctcttttattcatttcctcgattcgaacaactgcagataat

SEQ ID NO: 26371 - DNA, 174 bp, Glycine max
  Clone ID: 701097651H1
ctcgatcgatttcgattgttgaattcatcacatcacggagccttgtacgttgacaacgatggtgctgccgctatttactgctttcattctctttgcttttattccgaatggattgttagcaattccttccaacgtcccgggattcccttgggtcatcacattatgaactgggct

SEQ ID NO: 26372 - DNA, 260 bp, Glycine max
  Clone ID: 701097652H1
gcaaattgagaaaaacttggcaagcttagaaaatgttgtgatcatgctgatatactatcagttggaccagccaaagaggagaagaaagatgaaccaaagaaagatgagaagaagccagaagacaagaaagatccagaggaggaataatgtgaacttctgaaaggcttttcatatcagaccaagcaagcagaataacccccttaattatccaggaccatgggaagagatcccactagctgggttaattgctcagtaatggg

SEQ ID NO: 26373 - DNA, 247 bp, Glycine max
  Clone ID: 701097654H1
ctcgagccgcttttctcttcttattttcaaacatggagtggcatagcaggcacaccataggccaaggctcatcagccaccgtctccaccgccacatgccgtggcggtgtcttcgccgtcaagtcaacggagcttccacaatcaagagctctcaaaaaggagcaaaaaataatgtcctccccaagtagtccctaagggggtgcctaccaagggtgtgacattaacattggggaccacaagcccctggt

SEQ ID NO: 26374 - DNA, 244 bp, Glycine max
  Clone ID: 701097655H1
aaagattggtcaaaatctatcctatctctttgcatattctttcttatcatcatcttcttctctcttgcctccagaattggaaagttcttcctctgcccagagtctttgacacccttttccaatctctaggtgttttaatgtctttcctctataattatcgccttcagaaaacctctatcccgcagaacattgagtaccaaaaacccaaggcttggacctctcaaaggttgaatcctttcctctt

SEQ ID NO: 26375 - DNA, 114 bp, Glycine max
  Clone ID: 701097656H1
aatacaagtagtaatctaaatctctatccttatagttttctgtgagacacttttggaacaaatttctcaatatcatttgtgtctcatcaagagcagtttttcaattgagcaata

SEQ ID NO: 26376 - DNA, 263 bp, Glycine max
  Clone ID: 701097658H1
atcgccgctggctccaaggtgcccacactcgatcagcttctctccttcctccgatccaaatccaccgatcatctcaactccttcgcctctcagctcttcgccgtcgtgctctccgacgcctctcccgccggcgggcctcgcctccttcgccgacggcgtgtggggtgagcaatccctctcgcttctcccttccttcaaacaacttgtcagtggctgttacaaggcccatttgggttcagttgatttccagaacaagggtgttg

SEQ ID NO: 26377 - DNA, 259 bp, Glycine max
  Clone ID: 701097659H1
gttttgcagagtgtcgcgtttgtcgcattccatacgaggccgaagcgaagagtgtttgtagggtttgcgttgcgcatcgtttgagagagagagatgggaagatgaaaagagacaacaaaggtagcttacgcagtggagcagcttgtagccttcaatcgatacaatcccgatattcttccagatctcgaaaactatgtcaacgaccaggtttcgtcgcaaacttaatagctggacgcgaatctctgccttcttcgcctct

SEQ ID NO: 26378 - DNA, 105 bp, Glycine max
  Clone ID: 701097660H1
cgttttcactgatgtgtgcattgggtggcctggttcaatgggtgatgatcaggttttggataagtcagcgctttttcatagggctaataatgcggggcttaatct

SEQ ID NO: 26379 - DNA, 252 bp, Glycine max
  Clone ID: 701097661H1
cgtttgctacctaaaccctagtctccatacatcaacttgggaggttaaagagacggcaacgttgtgctgtccgccttgaccgagccagagcttcgtcttggccctcgattttgccctgtaaaactaatcccagtcacaacagaaataatcaatggcaccgaaacagaccaaggctgagaagaagatcgcttacgatgcgaactgtgcgacctaatggaggagtacggccaaatcctcgttgtaaactccgac

SEQ ID NO: 26380 - DNA, 267 bp, Glycine max
  Clone ID: 701097663H1
tgcaaattcaatggcttcagagaagaaactatcgaacccaatgagggaaataaaggtgcagaaactcgtcctcaatatctccgttggtgagagtggagatcgtctcaccagagccgccaaggtgttggaacagcttagtggccaaaccccagtgttttccaaagcaaggtacactgttcggtcctttgggattagaagacatgagaagattgcatgctatgtcactgttagaggtgataagggtatgcaacttttggagagtggttt

SEQ ID NO: 26381 - DNA, 257 bp, Glycine max
  Clone ID: 701097666H1
gcagtttccaaagaacccaactcaacttcaaaaccccataataatctctctttgacattcatagaaaacacacaccatggactcttgttcatcaccgccagacaacaactccctcgctttctctctttccaatcactttcccaacccttcctcctctcccctctcccttttcaactccttcacctatcaatctctctctctcacaggacgccacagggcggatcaacctctggagccaatggccggcggaggagcga

SEQ ID NO: 26382 - DNA, 259 bp, Glycine max
  Clone ID: 701097667H1
acaaaatccaatattcaccatattcttgaaccaaattaacaagcaaggctagtgtactctacttgcagcctgaagctactagcaagcatcgtataggaagatcgagaagaacaaagttgatgaaaatcctgaaggaattaactatgagatgaaatggggtcgtgattcttcaatggatcacaaagggaagagttctgttcgagctttcactggttcttggaaaagttctctcttcatcattgggagtgaggttagtgag

SEQ ID NO: 26383 - DNA, 153 bp, Glycine max
  Clone ID: 701097668H1
gcatcccacaaattatcttcaatagaggtccgagttgacgatgcgagagacacagtcagggtccaagctaaaaaatcttctgaactaaagaatagtcatttgcttgacggtggtgttcatgttgaacaacctggttattgtgctaatgggtaa

SEQ ID NO: 26384 - DNA, 183 bp, Glycine max
  Clone ID: 701097669H1
tgtgaatcgcttatttggaatcttcaatgcaattgctatcattgccacgacttatggaaatggaatcattccagaaattcaggcaacattagcaccacccgtaaaagggaagatgctcaagggactatgtgtttggtaatcttgtcttataagttacctctttaagtgtatccgtatcccggt

SEQ ID NO: 26385 - DNA, 191 bp, Glycine max
  Clone ID: 701097670H1
ttgaattcttaggattgctctgaatcggtttcgtcttcttcgtttttcttcaaaatccgcgtgacagatctaatctaatcagccttttgggggtgtttcagacattgcatgcatatgggagcagtgggtgtgttggatgccaaaaaaaggcctcactgagttccacagtggattttccaacaaaaagggtg

SEQ ID NO: 26386 - DNA, 239 bp, Glycine max
  Clone ID: 701097671H1
tgcaacttctcactcttgtgatgcaaaccaacctattgcagcttctaactctggcgatccaaaccaaggacgctacgctttagaaattaagtattatgcctttccgaaattccaatatgatagtacacgaaaagctatggagaaatggtggatttttgtcaagtgtgattgggctaatctgttaagcgttgaggtcctccttcaaacaactaatttgaaagtgggaactcctgaagatc

SEQ ID NO: 26387 - DNA, 115 bp, Glycine max
  Clone ID: 701097672H1
cactcgagccgatcggctcgagcggctcgagaattattgttctcaagcctttgcttaacgtttaaagatctccattttatttggcagtgagaagtaatcagctggggattcgtag

SEQ ID NO: 26388 - DNA, 254 bp, Glycine max
  Clone ID: 701097674H1
aaataacaaacgcacgcttctcattctctctctactcgttcagaaggattttctcacaaggactgagtatgaccgaggagtcaacaccttttctcccgaaggccgtttgtttcaggttgagtatgcaatcggagccatcaagctgggatcaactgcgattggggtgaaggccaaagaaagacgtgtcctttcagttgaaaagcgcatcacattggcggtccttgagcctagtaatgtttaagaaattatgggaa

SEQ ID NO: 26389 - DNA, 250 bp, Glycine max
  Clone ID: 701097675H1
agaaaacaaaaaatgaaaaattactcgatttttatttctccaaaatgatcaattttataagattgaatcgactaaaaaatgaaatgaatcatttcatattgatagtattgctatgcttagtgtgcgactcgttagttttttagaacggttccaatttaacaaatttataaaccggttcatcgtataaatgaattaaaaaagaactaataaccaacgcatcgcttcgggatatctagatctaaagaactag

SEQ ID NO: 26390 - DNA, 242 bp, Glycine max
  Clone ID: 701097677H1
acaacctctagataaatggggaacaaaagctcatcaacttcaaaggcacaatatagtagtaatagccagggagaaaaggttgcttcaacacaactacaatatgttgctgctccacacccgaggaaaatctccacaaataatccaaaggatgtgagtcaaacacaacaacatggtaagaagccactaggtaatgatgaagctttcacacttacattaaagatgctagggttaaaatgaagagc

SEQ ID NO: 26391 - DNA, 261 bp, Glycine max
  Clone ID: 701097678H1
ctcgagccgttttcattgttgaagctcacaagcaaaggctaaagtagattctattctcctcaagcaaaacctatagctcccccacactcctccagtacttgaataaaagctagataaatattaaagcctttccttcatcaaggtactgtttgatctttgaatttcagtcctcaaagattggaacaacaggaacatgtgtactctcacaactgttcctgtgctcccttctaagcttaacaatccttcgctttctccgaacca

SEQ ID NO: 26392 - DNA, 243 bp, Glycine max
  Clone ID: 701097679H1
tctcgatccgattcggctcgagatcattgttggctattcattcattcatgttcctcaggagagagaggttgcgtgtgattcggattcgaattcgaattagggttttgcgcatcgtcatcgaatttttctcttatgcaaggaaggttttccttctccgatttgaatttgattgaacgagtagtgttaagattatgatatcttttgagaagcttcgtgtctctcctcacttgagccgcttcattg

SEQ ID NO: 26393 - DNA, 269 bp, Glycine max
  Clone ID: 701097680H1
gaaatggtgattcccgttcgctccctccctcgaccaccaccgccgccgccagatcaacctccccaagccccaccgtgtctccgatttcctccgcaaaacgcccaacctcttcgaactctacaaggaccagaagggggtgctctggtgcggcatgaccccaaaagccgagaacttgatggaacaacaacaaagggtcatcgaagaacacgccgacaaagccaccgaacacgtcacgaggtttctcatgatgtcgctggacaaaaggcttc

SEQ ID NO: 26394 - DNA, 131 bp, Glycine max
  Clone ID: 701097681H1
tctagaatacttctcctcttgtctctgttcaagctttaatattgcatcccatgcattttaagatggagctgtctctaataccagtaactatagctccccgggggcaagtgcaatgcccacttgaggtcatt

SEQ ID NO: 26395 - DNA, 133 bp, Glycine max
  Clone ID: 701097682H1
atgagaaagaaaaaggaggtttgagagactagaagaggattgggatttggcaagagatttagattagcatggactcaagaatggagtgtagtagtcatcaacaacctcagtcactgtaaaatttttttggttg

SEQ ID NO: 26396 - DNA, 79 bp, Glycine max
  Clone ID: 701097650H1
agtggatcgattttagttctgtatggcttgacatgggaatagcatgaggaatgtgagaaagattgtcggttaagatttg

SEQ ID NO: 26397 - DNA, 258 bp, Glycine max
  Clone ID: 701097683H1
tggttggggtcgcttagctcaccatcctcaacttacgtaaaacatggtaattcaaatattaggctggaacattttaaattgtctttggagaaaatttagttgaacctgggttatttgtaaaagttcattttgactctagggtttttttagtccataaacttttccaattgcttgagatgatataatattataaggggtttctggcatagtaaggttaaaagatgtttgatatgtcaacgtctcaaacaggcaaagtaa

SEQ ID NO: 26398 - DNA, 165 bp, Glycine max
  Clone ID: 701097684H1
cttccccatctttccggagcaaggaattcaataggattgttgatttgcatcctactaaccttgatgacctgttagcatctgctgacccttctgtattttctcaactacatggactttctgtgcaaccttcaacacccacacaaagtggggctcagatgcggcaaa

SEQ ID NO: 26399 - DNA, 257 bp, Glycine max
  Clone ID: 701097685H1
caaccaatcaccctgtctttctgacccaaaaacatagtcccaaatcgaacaaaatcaatcaactaactcctccaacgttgttgttattatgcagacaacaagttccaacacctccggcgccacctcgatcccgtcccgcatggagctcttccaccgcgcgaacggcggtgcgctccggaagcaacacgaccagtacctcctggccgacgaggacgaagagtccgtcacgcaagacccgcacggatcctcccgcaaag

SEQ ID NO: 26400 - DNA, 269 bp, Glycine max
  Clone ID: 701097614H1
tggaaaatatttttattttaccgtactgaatgttttcattggagttactattggtggaaccttgttcaaagcattcaagagaattcgggagcacccgacgttggatgaaatttcgtccttgctagctgaaagcctcccaggcaatgctacttttttcttgacctacgtggcccttaaatttttcattggctatggtcttgaactgtcccgaatagttccccttattatctaccatttgaagagagaatatctttgcaagactgaagctg

SEQ ID NO: 26401 - DNA, 270 bp, Glycine max
  Clone ID: 701097615H1
ctttggtattcctcactcagagcctctcatcagagagagagaaagtgagagatggagagaatgttccctcccaagaagccctctactatgaattcccatgacagacccatgtgtgttcaaggagactcgggtcttgtcctcaccactgaccctaaacctcgcctccgttggactgttgagctccatgaacgctttgttgatgctgttactcagcttggagggcctgataaggccactcctaaaaccatcatgagggttatgggtgtgaag

SEQ ID NO: 26402 - DNA, 268 bp, Glycine max
  Clone ID: 701097616H1
ttcgaatccaaggaagggaaaggaaagtaagagaagagaagaatggccgaagagggacaagtgattggtgtccacagcgtggaggagtgggaggaacatctcaagaagggacaagagtccaagaaattgattgtggtggattttactgcttcttggtgcggcccatgccgtttcattggcccaattcttgcggatatggctaaaaagttgccgaatgtcaccttcctcaaggtggatgtggatgaattggcgactgtttccagggagt

SEQ ID NO: 26403 - DNA, 265 bp, Glycine max
  Clone ID: 701097617H1
aacgacgtgtcgcttcaatttgaagggaagtgcagtggaacgtgcgaaagaagtgcatcaatctggttcttctgggtagggcttgtgttgtgataaagtcttacagagaagagtgtgtgtgtgtgataattgggataagctctaatcaatcaatttcagtggcatcatccaattcgactcagcaagaagggatcaaacccgcaaggagaaaaccggtgttcaccaaagtggataagctcaaacctggaaccaagggtcacacgtt

SEQ ID NO: 26404 - DNA, 240 bp, Glycine max
  Clone ID: 701097618H1
ctttctctctctaaagctgaaacttggacactgcaacaagacaagcactcaaagtgcttcgaattcgtcactgatcacgtttctgcaatgcaccgcgtgggtaatgcaagtaatggaaacaattcaactcgccctcgtcaggagaagagattaacctacgtgttgaatgattctgaatgacctacagcattgtgcaggcataaattgtctggctctacttacgtttgcggcatctgatgg

SEQ ID NO: 26405 - DNA, 267 bp, Glycine max
  Clone ID: 701097620H1
ttttctttcaacatgtctacaccagcagaatactacaggtctctaccacctgtgagcaagacctatggagtggcctgtttgatgaccacttctgcatattatctgcaactctatgatgcaaggaacatagcacttgattatgggccagtgtttaaaaggcttcaagtttggaggcttatcacaaatttcttctttcttggctcattttcattaccatttgcagtccgtctgataatgatagccaaatatggtgtttcattggaaaga

SEQ ID NO: 26406 - DNA, 155 bp, Glycine max
  Clone ID: 701097621H1
cgcggcttcaaccttgtagttattctctttcttcttttttagctatccctctcttgaaaaatctagatctcgttcttccttgatctacgttacgcttttagtgaccggatctgtatggatctggaccagatctacacgccggtggtgggtttggc

SEQ ID NO: 26407 - DNA, 171 bp, Glycine max
  Clone ID: 701097622H1
cctcgagccgattcggctcgagcaccggcatcacctacgaccgcgacagcatcgagaagtggctcttcgccgaggtgaagcactacacgtgtcccgtcacgaagcagcccctcctcccggacctcactccgaaccacacgctccgcagactcatccaagccctgtgccacg

SEQ ID NO: 26408 - DNA, 229 bp, Glycine max
  Clone ID: 701097623H1
cacacactgtgtttgtgaaactccctctcacacacaagtcacgaaaacaacttgtgttgttccaatggcatcagcaacaccccttttgaaagatgagctcgacatcgtgatccccacgatcaggaatctgggtttcctggagatgtgcggggcaatctttgagccctaacaactcataaatgtgccagatggttgaccttcaaaggccaaccagggtcccgaaaggctt

SEQ ID NO: 26409 - DNA, 229 bp, Glycine max
  Clone ID: 701097624H1
cagaccttattttttctgtcatttgcttcaaatttcaggagattaattatgcgctcaacccacaacaagaataggccttgctggattggctgttaatgggcaaaatctggcactcaatattgcttgaaaagggcttcccaattccggttaacaacggaaccatttccaaggttattgggccataagacgaagcaaaccaggaaggaaaccttcaatttatggggaacaa

SEQ ID NO: 26410 - DNA, 224 bp, Glycine max
  Clone ID: 701097626H1
ggaaaaataagatcatggaagtctgtggcagctcttcagatgttggaaaaacaaatgggtcctgaatcttttcgtagaaatttgcaaactatagtttctcgtgctcaagataatactcgttccataaagactcctagtactaaggacgtttcgacattttgctaacaaagttgggaatcctgaacgcccaattcctaaaaaattccttcctccgtggggtgggt

SEQ ID NO: 26411 - DNA, 264 bp, Glycine max
  Clone ID: 701097627H1
agctacttcaccactccaaacccagcacaccaccattattcatatctcattctctaacctttcactctgccttactcactctctactttgctcatcatcgtagatgaacaacacttctagtctctcttactttataaccatgtaaaaatgagtcacctcatgacaaattagtagcttcttgatgtgctttttattctgtttgtgttgagataaattcggttgtttgtttggtattggcttatcgtttatgaattatttgatggg

SEQ ID NO: 26412 - DNA, 182 bp, Glycine max
  Clone ID: 701097629H1
ctcattcgtcatggaacaacacattcactctctctctctttagtgattttctcgatttgattgacaaacacaacgaaccaaagttaactactttagagagagagagagagagagagacagagagagcgagagctggagagtgaacggataagcgtcggacgagagagagacactagagcagc

SEQ ID NO: 26413 - DNA, 261 bp, Glycine max
  Clone ID: 701097631H1
cccttaaggaacccatcgtagcctacactggcttctctccttccaccttcttcacggtgctggcgcttctttttgccgtttactacgtcgtcacgggtctctttggctcctccgacgatcaccatcaccgccaccgccacgtcgaggaggacgaggagatgccgcctctgcgccccccggttcagctcggcgagatcacagcggaggagctcaaggcctacgacggcatcgatcccgagaaagccttgctcatggccatca

SEQ ID NO: 26414 - DNA, 208 bp, Glycine max
  Clone ID: 701097633H1
cgcagcaaccacccgtcggtgttcctcctccccaaggttacccaccgccggattcttacggaaatgacgcgtatcctccgccagggtatccgccgcaaggaggataccctccgcaggcgtatccagcacaggggtagcctccaccctacgcgcctcctcagtacgctcagcctccgccgcaacaacaccagaattcatctggcccagg

SEQ ID NO: 26415 - DNA, 267 bp, Glycine max
  Clone ID: 701097634H1
ctcggaactttgaaaacgtggaagcacaccccagaccccacaccagtccccgtttgttccgctgcaaaacaaaaacaccgcgtcttccccgtgcggggaaaaagacaagaaaagaaaagaaccctcaattttccgggaaaaccctccccacaatggtttcccgggaaaacaccaattggctcttcgattacggcttgatcgacgatattcccgttccggacgccaccttcggcgtcaattcctccgccttcacatggccccctaacg

SEQ ID NO: 26416 - DNA, 188 bp, Glycine max
  Clone ID: 701097635H1
cgcttcattgtttacacgaagccaagggcaaacccaatccaataaacaacactgttcagagacccgtgagtcttcgtcagttccaattcgttaccgcgaaaatgaacgaacccacgagaaaataccgcaagaagaacgaagaaggatcaagatcaacccaggagagtgacaagaagaaagaactaaag

SEQ ID NO: 26417 - DNA, 217 bp, Glycine max
  Clone ID: 701097636H1
ctggttagcaacccagtgtgtgattcctcagttcaacaactctcagcaacatgcacaatcctcccccgccaggcggtccacgccctcaccagcacaccggcgcaccggctccggcaccacatgctcatccatctcctccgcctcctgggcctccaaaccagcaacacggcccacccggcccaccggatgcttatccaactcctccggctcctggggc

SEQ ID NO: 26418 - DNA, 229 bp, Glycine max
  Clone ID: 701097637H1
gccagtagtcatatgcttgtctcaaagattaagccatgcatgtgtaagtatgaactaattcagactgtgaaactgcgaatggctcattaaatcagttatagtttgtttgatggtatcttctactcggataagcgtagtaattctagagctaatacgtgcaacaaaccccgaattctgggaggggatccattaattagttaaagggcaacaaagggtcttgctggtggct

SEQ ID NO: 26419 - DNA, 262 bp, Glycine max
  Clone ID: 701097638H1
gaaattgaatgcttcagggttttcattattgttttttcccatcactatgcaacttcttcatctcgcttggataaacttaccgagatcataaataagtacggtgcgggagaagatcgaagcatttttccatttttcttcgaggtggaaccgaatcatttaaggttttcaaaatgggaagttttgaaataagcttgtgattgctcatgccaaccggtgtggaatccaaatggttaccgaagtggaaaattaatccggaaaaagg

SEQ ID NO: 26420 - DNA, 212 bp, Glycine max
  Clone ID: 701097639H1
attggaactcatgtcattcatcacctatttcctcaaattccacactatcacttagttgaggctactgaggcagctaagccagtgtttggaaaatattatagagaaccacagagatcatctcctcttccctttcaccttattggggaattaattaagaagtttaaagattgccaatttggtaatggcaaaggggatgttgcgtaatatccaac

SEQ ID NO: 26421 - DNA, 258 bp, Glycine max
  Clone ID: 701097642H1
tctggttcgaggcgcgagctagggtttatcgagggtttcgtttctctctgcaacaacgatggcgaaaaccgggcgaggtcgtcgctctcactccggctccgtttccggctcctcctctcgctcctcttccccctccgactcccgctcctcctctcgctcgcgctccgtttctcgttcccggtctccctcgcgctccagatcctcctctccctcctcctcgtctccctcccgaagttctcgcagccggaacccttcccc

SEQ ID NO: 26422 - DNA, 268 bp, Glycine max
  Clone ID: 701097645H1
aagcaaccccgttgtccggagccaccattttgcgctccggcaatgttcttcccggtggccatcgtcccttaaacccaccacacttcaaagtcatgggtattccatgggacgacgtcgttgtgatccagcaagggaaggatcacaatgagccctgcatcgtcaccgtcaattgccccgacaaggctggtctcggctgtgatctttgcagaatcatcctcgagttcggtctccgcattacccgtgctgatatttccacggatggaagatg

SEQ ID NO: 26423 - DNA, 255 bp, Glycine max
  Clone ID: 701097613H1
agaacagaagaatggcctcaaaatcatccaccattagacttgtttgtttctgctacttcatgctcttcagctctatgcatttcaccagctgcaccgtgctctcattgaaaagtcatgcaagcacatagaatggttccatagctgaatgcaatcaagaagatgagctgttgatggagtctgaaataagccgaaagtttctggagcagaagagatcatacatttccaatggagctttacagagagacaaaccagttt

SEQ ID NO: 26424 - DNA, 188 bp, Glycine max
  Clone ID: 701097649H1
ctctgcttccgacacaaatcaatctttctgatcatatattattctcctgtcgttttaatttattctccatacacatgcagacactaagttcgaacaagttcaggagcggcatggatttcttccaccgcgcgaaggcggtgcgcctccgcagccaccaggacaagtaactcctccggggagatgacgag

SEQ ID NO: 26425 - DNA, 252 bp, Glycine max
  Clone ID: 701097575H1
ctttgagtggctttactggcctcaagctcgccagccatactccccagaaactattgactacataaagtcactggatgctgaagaagatattgcccttttaaagtttcatggatgggatctgccagttgaatgtgcccgcactcttaggatctcaaccatgcttttgaagaaaggggtagagagaggattgaccccttttgccattggaaacctgatgtgcagagaatccttgaacaaggaatctgtgattga

SEQ ID NO: 26426 - DNA, 239 bp, Glycine max
  Clone ID: 701097576H1
ccacaattcacaaccgaaacagtttccatctctctcacaaaatgacaacaatatcaaattgctcccttctcttcctcttcctcttcctctccaccctccacatagcttccaccctctcaacccccaccaacttcatcaagtcctcctgcagcaccacccagtacccagccctctgcatccagtccctctccgtctacgcctccaccatccagcaagacccccacgaagtcgtccaggca

SEQ ID NO: 26427 - DNA, 228 bp, Glycine max
  Clone ID: 701097577H1
acttttacctgcaaaagtgccaagtccttgcatcagttctctattgttttggcctcaaagttcagatcatgctttccttttcatttaagaatatctcagaatttgagtacactgctaatgtccagatggaattggagtaaaatgtggataacaaacactttaaatagtagttactgacatttgttgttccataaaagagagacataattttggtgttggttgcatata

SEQ ID NO: 26428 - DNA, 263 bp, Glycine max
  Clone ID: 701097579H1
atttcttctctcttaaccccaattttctcttcctatagttaggaattaatcttttttgttctccttgtttaattaattgataatttttggtgatgggcaattacatttcttgcaccttggctcctcctttgatgaagaacacaagggcagcacgcgtgatcttccccacgggcgaagtgaagcaatacaaggagcaagtgatcaatgtcgccgagctcatgatggagtgccccactcacttcttagccaactccaactcccta

SEQ ID NO: 26429 - DNA, 264 bp, Glycine max
  Clone ID: 701097580H1
ctttttattggcggtaaaatgccagaagatattgtttaccaacaccctttgtttggtggcaagatatctagcacattcgcccacagattccaggatgtcagcagcattcgacaagtccctgatcatcaggaggtgtttgcggacccgagccgtgatgaaagcttgatctgtgagctttgagaattcaagcctgatgttgctgataatgggagtgctggggggtttcttcaagacctggctagtgaacaggatgctgaaggaagt

SEQ ID NO: 26430 - DNA, 254 bp, Glycine max
  Clone ID: 701097584H1
gaacattaccatcataagaaggagtcagaccttgtcgttccaaccgataaactaagtttcctgaatagagcctgtgttatcaaagatcgggaacaagaaatagcctcggatggttcagcatcaaatccatggaaactctgcacagtagatcaagtagaggaactaaaagccattattaaagtgattcccttgtggtctacagggatcatgatgtcagttaacattggaggctcatttggattgctgcaagctaa

SEQ ID NO: 26431 - DNA, 254 bp, Glycine max
  Clone ID: 701097585H1
tctcgagccgattcggctcgagaaacattataatttctattacatacattttgtagctaggatcagcaagttactactcattcgtgttgctgggttcgtggcaacctttgtcaccatggtgatgatgatggtgcccaaaaacgtgagtgcccaaaacataggtgatgacatcgtcacacaagacttcttcaacagcataatcagtcaggctgatgatggttgtgcagggaagaacttctactcacgagatgctt

SEQ ID NO: 26432 - DNA, 233 bp, Glycine max
  Clone ID: 701097587H1
gaaaaatgtgagtgacgctgcaacgtttaactataacactagagacttattgagccatcttgctcagagagcttatgtgaataataaattgtattcaactggagaggcgaagcttgagaattcggagacacgttatggtttgactcagtgcactagagatctttctagcagtgattggaagaagtgtcttgatggtgcactcaatggactgcccaaatggttgtgatggcaaa

SEQ ID NO: 26433 - DNA, 244 bp, Glycine max
  Clone ID: 701097588H1
cttaagcttaagaacaacaagaagcatcatgttcatagaaaaagtgaagttagcgtaacaaagagttggtgtgcaatgattccttggcttttgggagcagcctatataaatcgccaattcttaataaacgttcgaaacatcctacttttctttcttgacgcaattcagacgccgttcctattcttgatcttcatcatgtccaatcccaaatccgagtcagtagtgtctgaaccctctgattcgg

SEQ ID NO: 26434 - DNA, 248 bp, Glycine max
  Clone ID: 701097590H1
cgacgatggtgtgtgtgtgcgtaacgtaacaaactaaactagggttacaaacaaccagatcttcacgcaaacttctgatttgagttttactcctttagatctggaaatcaatttctgattttcatttaaacgcttggccgaattgtggagctgccaaagcaaaacacttattattatgtgagagcaataatgggctctggaaatatactaccttcttctggcagctctggcatgtctatctccgagct

SEQ ID NO: 26435 - DNA, 202 bp, Glycine max
  Clone ID: 701097591H1
ccattcttaggaaaggaagaagattatcaaaggattgaaggggcacatagacaaaacagcttatcatcaatatgggtgcatggtgctggtttgcatcctttcagttgttgacgacaccaaactgataacaaaggttatcattcgtgagcttcagtcaattttaaaggagcttgttctagataaggttcctccttccatactt

SEQ ID NO: 26436 - DNA, 250 bp, Glycine max
  Clone ID: 701097592H1
cggctcgagcaatctcaaagttcctacaaaccccataatgtggatgaaggtgaagatggatggcagactgttggtagaaagccttcaaggcatccacataaggttcaaaaggacaactggaacagctataaacgacctgctgatgagcaagaatactctaatgaggttgaagttggtgctgatgtggagccctcagaagatgaacttgctgatctgtcaagagcttgtgaaaaactctggggtcttgatt

SEQ ID NO: 26437 - DNA, 226 bp, Glycine max
  Clone ID: 701097594H1
ctgctcgaatggtgtctatgtcactaattgtctatatacagtcatacgttagctgggcaatagggttgggaattcctgcggctttgatgctagtctcttgcagcactctactacacgggaagcaattattacgtgaaagttaaagcaactggtcaagctcaactaacaagtttagctcaagttgtagtcgcggctatagagaaaagaagcactgaatctcatcaga

SEQ ID NO: 26438 - DNA, 213 bp, Glycine max
  Clone ID: 701097595H1
gcatgattgtggtgtgctttgttttcatttcatcatatgacagccttgtgggtttctttggtgtttcttgatgcatacttaatttactttattattgtgtatttatctcttccatttacaaaaaaaaaagtttgtgtaggtttccttctttgaagtaaaaagaaatcaactatgtactaaaaatggaataatggtgtgttatattcgtgtttt

SEQ ID NO: 26439 - DNA, 267 bp, Glycine max
  Clone ID: 701097596H1
tggaaatccaattgcgagtttacccacacctggatttctgggcatgactgcacctgagccttggagaccaccagcttcaagtagtcagtcaaacaccacagctccatctccagctcaacccaatatgccttggggcatgggcatgccaggaaatcagaatatgaactggggtggggttgtacctgccaacatgaatgtaaactggatgcctgcgcaggtgccagcacctggaaattcagatccaggatgggctgctcctagtcaggg

SEQ ID NO: 26440 - DNA, 124 bp, Glycine max
  Clone ID: 701097601H1
cttgagaatctcaacggtgtttcgtttgtggttctggttttagaatctcattgcttgaaaataaactattgtactgaaatgtcaagcttgtgtgttgtaataaaacaagattaattgttggttt

SEQ ID NO: 26441 - DNA, 227 bp, Glycine max
  Clone ID: 701097603H1
gatccttactacgatctggatgtgaaggaggcgctgaatcggcttccgaaagaggtggtggacactcgccacgcgcgtcttaaacgcgccatcgatctttccatgaagcacgagtacctccctgacaatctggagtcaatgcaaacaccattcaggggctacctccaggatatgctgattcttgtgaggagagagaccagcagaccgtgaagcattgggaggttgcc

SEQ ID NO: 26442 - DNA, 269 bp, Glycine max
  Clone ID: 701097604H1
aaaacgaaacacaaacagtgttctctctttctttctttctttctgtctgttgtgctctctgaacatgttgatggattccccctctcgctcctccgtcatcatcgtaggtgccgggatttccggtatcgctgcggcgaaaggtgttggccgagaaagggcgtaaacgacctggtgatcctggaagcctcggaccgcatcgggcgcaggatctgcaaagagagcttcggcagcgtgatggtggagctcggtgtcggatggatcgcttgcgt

SEQ ID NO: 26443 - DNA, 267 bp, Glycine max
  Clone ID: 701097605H1
ctgcaatcgaagctcgatacagcagcaactagaattggaataaaccctatgtctcttttcaagggtgtttggtctctgttctgctccaaaaccgtagaacaaaaagcagaggagcatgagattgagcagaccctgagtttgtttttgcatgatataggcaggacaatgtcttcagatctcagtgagtataaaatcatcaaggaaagagtagctgagattcttatggacgcaaaggatgaagtcttctataacaaaactcagggcaat

SEQ ID NO: 26444 - DNA, 96 bp, Glycine max
  Clone ID: 701097606H1
tctctctctgtctctttctctctcatccagatcttgcaaaaaaaggaaaacgcaatggcagggagcgttcccactcaaggggaggagttcgtgtaa

SEQ ID NO: 26445 - DNA, 163 bp, Glycine max
  Clone ID: 701097607H1
tttgggtcttccatgctctttggaacaattgtcggatctctagctgacaaacaaggccggaagagggcttgtgtgacttactgcatgacctacattttgagttgcatccacaagcattctcctcattacaaagtcctggtgtttggccgtaatttgggaagta

SEQ ID NO: 26446 - DNA, 254 bp, Glycine max
  Clone ID: 701097608H1
cttagacgaagtcacaattcgcaatcgtcgtcttcgaattcctctccttcgtcgtcgtcgtcgcaatcgtcgtcgtcgtcgtcttcctcctcttcgtggatccatttgcggtcggttctaatcgttgtcactttctccttcacaagctcttggatggcctctgatcgggggtcgtcttaaatcaccatgtcaacccaggaaaagaaaccattcctttcaactcaagcaagggaaagcgtggtttacccaggttg

SEQ ID NO: 26447 - DNA, 195 bp, Glycine max
  Clone ID: 701097609H1
aggatttcggccgtttgctccccaaggaaagaagcagagtgtttcttttgaaatcagctagaaaagatgtcaggtgaagaggtagctgttgcagctgaggcacctgctgcttcaattccaggtgagccaatggacatcctgactgctctacagcttgtgctgagaaaatctctgggctatggtggtcctgcaaga

SEQ ID NO: 26448 - DNA, 262 bp, Glycine max
  Clone ID: 701097610H1
gtaatggctctatcgccaaggccactctcacattccacaccaaagacgatgtcccactctcagatgcagtgcgtgatgaaacaaaggccaggggtgctggaattttcaaggccattgagggctacgttttggcaaatcctgctcaatgattatccttcaaaccacttgcatgcatgcaataataattatatcagcttatgaactggttgttggagttaatttgtatcatgtggccttggttgggttaattaatttcccttgc

SEQ ID NO: 26449 - DNA, 258 bp, Glycine max
  Clone ID: 701097611H1
catcgagccgattcggctcgagcggctcgagaaaaaacttcgtataccaaatccgacgccgtatttagatggattttgccagacatgatgaaccacctacctcgaatattcggccatagaaagaagcaagcctccgacaacatggacccgacgacaaagcacaagaagaagagtaagaagaagcagcagcccaaactcgagcggcgcaacggcttccatcacttcgaatacgacgccggatcgtcgtgctcctggcgc

SEQ ID NO: 26450 - DNA, 264 bp, Glycine max
  Clone ID: 701097612H1
aggttccctaatagtgattttatgagcagagagtttgaagtaccaatccctggttgcaaaccctacaagctcaacctcttcaggttggtttggaggacactttttgtgattttgtcaactgtgatagccatgctcctaccattcttcaatgacattgtatccgttattggagccattggattttggcccctcactgtgtatttaccagtggagatgtatataactcaaactaagataccaaagtggggcataaaatggataggc

SEQ ID NO: 26451 - DNA, 253 bp, Glycine max
  Clone ID: 701097574H1
ccacaacaaggcagcagtgcgaagagaaagaaagagaagaagcgcttatcgaactcggacggaagcactgagttaactcagagcgagtgaaagtgttgctgcgtgatgtctggtggtatcgcccgtggacgcctcaccgaggagcgcaagtcgtggcggaagaaccatccccatggttttgttgcgaaccggagacgctgcccgatggaaccgtgaacttgatggtgtggcattgcactattcccgggaagac

SEQ ID NO: 26452 - DNA, 260 bp, Glycine max
  Clone ID: 701097545H1
cctcgagccgattcggctcgaggtttgattccttcaccagagttatataaacatgttgtatgcgttttggagtttcagctagagacttggacaattttggttgctattgtgtgcatcttgctatttcttctgaaggagtttgttatgggagggaagagctcaaaagggagtggtaggaggtatgattttggtgcttcttcatcttcaagggataatagctatggtggataccctccgcaatcaccatacacttcttatca

SEQ ID NO: 26453 - DNA, 264 bp, Glycine max
  Clone ID: 701097546H1
gtttgtatgttcatttcatcaaaatccttcaagattacaggaatagatgatagaagatattggaataatattccaactgaggaatccaggttcaagagtgttgcatatcttcaacaaatgtggtgggttgaagtaataggggagctagagtttgagtttccaaaagggaactatagtgtatttttcaagcttcaattgggcaagccctcaaagagattgggccggcgagtgtgcaaccttgatcaagtgcatggatgggacatc

SEQ ID NO: 26454 - DNA, 258 bp, Glycine max
  Clone ID: 701097547H1
cagactgagagctctttcttgattctatgggtggtggtgcattgccgttcttagttggtggagcgatttgtctggttaattccgttaacgaacgagacctcagcctgctaaatagctatgtggaggtaaccctccacggccagcttcttagagggactatggccgcttaggccacggaagtttgaggcaataacaggtctgtgatgcccttagatgtcctgggccgcacggcgctacactgatgtattcaacgagtct

SEQ ID NO: 26455 - DNA, 276 bp, Glycine max
  Clone ID: 701097548H1
gatcgacgtttgataactttgctgaagtgcgcaaactctatgaaggtggagttacactacctacaaactttcttagcaagatcgcccctataccagtggtcaaggaaatttttcgaactgatggcgaacagttcctcaagtatccaccacctaaagtgatgcaggtggataagtctgcatgaatgactgatgaagaatttgctagagaaacgattgctggtgttaatccaaatgtcattaagattcttgaggagttcccaccacgtagcaagctag

SEQ ID NO: 26456 - DNA, 201 bp, Glycine max
  Clone ID: 701097550H1
cgacagtgagtagagaataagctatgcagttcaatatcacatcatgattccttcatatcttctctcttaccttcttccttatcattagctcttgactttcacaatccaaccagttttgtgatgctgggactgaaattccatcatccaagttgttgatcaagggagggcacggttgtgaatggtcaccaccaacagatgggc

SEQ ID NO: 26457 - DNA, 212 bp, Glycine max
  Clone ID: 701097551H1
attgattcccaaaaccctaattgaagttctctcctccacactatatattgcttggttcgagtgagtctatcccttaaaggctctctctttgagtcgctgaggaaaaccctagctagtagtctcagtgcgtttgatagagaaaatatggcagatggtctcgttctacgtggaatcatgcgcgaccacatatacgtcgtgacggcgattgccag

SEQ ID NO: 26458 - DNA, 242 bp, Glycine max
  Clone ID: 701097552H1
tatacttcacagtctttatgataactgcatgaaataccatattggggtgcttgttgacaagtctctcatacagattagtgacgatagagttacattgcatgacttgattgagaacatgggtaaagaaattgacagacagaaatcacctaaagagacagggaagcggaggagattatggttactagaagatataattcaagtcttaaaagacaactcggggaccagtgaagttaaaatcattt

SEQ ID NO: 26459 - DNA, 254 bp, Glycine max
  Clone ID: 701097553H1
gtcgcgttgtgttgcgtcgtgtcgtgcgctgttcctctgtctgtcgttattgttttcagaccaaaccctagctccgcatcgcaaccatgtcgaccaagcaaggtggaaaagctaagcctttgaagaaacccaagtctgataagaaggattacgacgaggttgacatggctaacattcagaagaaaaaggaagaggagaatgcgctataggagttgaaagccaaggcgcaacagaagggaagctttggaggttct

SEQ ID NO: 26460 - DNA, 257 bp, Glycine max
  Clone ID: 701097554H1
ggagaaaataatttaacttctctgtctcaatcatttcattatagttttctctcccttccaatcccagcgatctccagttagggtttcgtttcgtgatttctgtctcactggaaaaggaatatcaagaagaagaattgtttatctacatctgattcaagtccatgaagccacaatcatcgtctttgaatccatatgcaacgtcatatgttcctctctctagaaggggggtagatggtagaacaccttcgactgaaaaa

SEQ ID NO: 26461 - DNA, 259 bp, Glycine max
  Clone ID: 701097555H1
ggaggaaaagagatgaccctgaagcaatggaagaggatgatgttgaagatgaaatagcagaaatcaaggctgctcattttgaggaatcaatgaaatatcctcgaaggagtcttagcgatgctgacattcgcaagtaccaggcattcgcccaaacattacagcagtctagaggatttggaagtgagttcaggtttgcagattccacctccggcggtggtacagctgctgcatctgagccattttcctctgctggtggagc

SEQ ID NO: 26462 - DNA, 260 bp, Glycine max
  Clone ID: 701097556H1
ggagattattatcgttatcttgccgaatttaaggcaggcaatgagaagaaggaagctgctgatcagtctatgaaagcatatgagtctgctaccactgcagcagaggctgatttacctccaacacatcccatccgattgggtctagctttaaatttctcagttttctattacgagatcttgaactctccagaaagagcctgtcatcttgcaaaacaagcttttgatgaagctattttctgagcttgacaccttgaatgagg

SEQ ID NO: 26463 - DNA, 236 bp, Glycine max
  Clone ID: 701097557H1
gaagggttgaaggaagaaaaaaagaaaaacacagaaatggagggtgggaacaacagcagcagtaacaacaaccctgatgagttggcggtggggtgcttgctttcgatcaggacaacgttgggcgacgaattcgaaggccaggtcgtcaccttcgatcgcccctccaacattctcgtactccaggagccttccaaacctagccctcgtcgaaatcttaggttgctcaaagccaatta

SEQ ID NO: 26464 - DNA, 255 bp, Glycine max
  Clone ID: 701097558H1
gacaaaaaatccaaaatttccactcacatctctctttgtttatgacatctcaaacatttatctactctctacccactttctcagttccagttgaagtgtggaaaaaatcttaagctaaaggcaatttgggaagctggaacaatgggttctgtttgttgttgtttgagttttgatgattttgaagattatgtaaatccaaatagtcctgtatataggaactgtgtgtgtctcagttgcttgatacagaaccttttg

SEQ ID NO: 26465 - DNA, 255 bp, Glycine max
  Clone ID: 701097559H1
ctttcgggtcatcattgagcttgctgtagtgaggtgttcaatctgcaatttccttaaccaaattcatggcggaactgatagggcctcgcttgtacagctgctctaattgtaggaaccatgtctcactccatgatgatatcatttccaaggcttttcataaacggccgagcctttctgttttcccatgcaatgaatattgtcacagggccaaaagaagacagacatctcttgactggcctccacactgttgctgat

SEQ ID NO: 26466 - DNA, 256 bp, Glycine max
  Clone ID: 701097560H1
gaaatccttagcaacatccaataggcagtgattcagaatggtatgacattcctgggattgatgaactttatgctcaagtgatatctcaagatctgtcagcaaggtgacttatcctatcagatagttaaaactcattttttcaataaaggagggccgtttgtcatgtactgtaatttttatttatttattttcatgatgtgtttggaaggatcagtgagaattctttttgttcaatatggagggaagtgcatttagt

SEQ ID NO: 26467 - DNA, 189 bp, Glycine max
  Clone ID: 701097561H1
ctcaattgctcctaacttacctccattcttaattttttggaagcttcaaacttaaaagtcttgtttgttatctttttcttcccttgtctacatctatatttattagaatttattggttgtgcatatcaattccagagtaccctattgttcatttttttttttcccgatttattgctattccaccattcg

SEQ ID NO: 26468 - DNA, 259 bp, Glycine max
  Clone ID: 701097562H1
cctttttctgttttctttccatataatcatgaaaatctctgctgggagttgtgattttcaaccataattttagattattaagttttgggcttggggaaattattttgattatattcttagttctaaggtggggtgttaattaatcatccccaactttttctgatgttcagctcagccccccacttaaattcaatttttttttgctgtctttttaaagatctttccctcatttattttttttgggctcatgaaagtagta

SEQ ID NO: 26469 - DNA, 265 bp, Glycine max
  Clone ID: 701097563H1
ggcttatggtggatacctaggcacccagagacgaggaagggcgtagtaagcgacgaaatgcttcggggagttgaaaataagcgtagatccggggattcccgatataggtcaacctttcgaactgctgctgaatccacgggcaggcaagagacaacctggtgaactgaaacatcttagtagccagaggaaaagaaagcaaaagcgattcccgtagtagcggcgagcgaaatgggagcagcctaaaccgtgaaaacggggttgtggg

SEQ ID NO: 26470 - DNA, 226 bp, Glycine max
  Clone ID: 701097566H1
attaaatcatctatttcatataacattgcatttcacttcatcacttggctagggtggtgcatttgcagctcttaatttcctcacaaatatggaggcgcgtagtttgtactcactagtgtttcttgtgcttgctttgggctattgtgaacacagtgcatggccaagggacgcgtgtagggttctattcgagtgcatgtcacttgctgagtccatgttaagtcaacag

SEQ ID NO: 26471 - DNA, 195 bp, Glycine max
  Clone ID: 701097567H1
tattcaattcagtctctttcgttatcaaattatttcttcgatcaaggtcgttttcgaaacttcaccaacatgagctactacgatcatcagcaacagcctccaattggtgttcctccccctcaagggtatccaggaaatgacgcttaccctccatcagggtaccctgcacaaggttaccctccaccaggttaccct

SEQ ID NO: 26472 - DNA, 246 bp, Glycine max
  Clone ID: 701097568H1
ctccagttttccacaatggaccttgcaaaagcatatactccatggagggaaatttcatccatgctattgagatgaatgaccaattccgaacaagggatcctgagaaagcacatgtgtttttcttaccttttagtgtagcaatgttggtgcaatttgtctatgtacgtgactctccatgactttggccccataaaaaagactgtcacggactatgtcaacgtcattgcgggaagatatcgctattgg

SEQ ID NO: 26473 - DNA, 252 bp, Glycine max
  Clone ID: 701097569H1
aaaagacaagaactacttccttctctcctttgctgtgttttctttctcaaaaatgggtcgtacctatgttcttatgatggttgctgcattgttgttgagctccaccatggctcaatctccagcttcgtcgccggctttgtcccccacccacacgccggtggccactccacctaggagggcgttgtcgccgtctccgtcgtctgtgtcaccagcggcttcacccggcaccggaaattctcctccgggaccacc

SEQ ID NO: 26474 - DNA, 256 bp, Glycine max
  Clone ID: 701097570H1
aacatgagtaacatgacttccttaagctccttagtgctgctccttgcagctctaattctattccctcaagttcttgctgactatgagaagcccccggtgtacaaggctcccattgagaagccaccactttacaagcccccaattgacaaacctcctgtttataaacctccagttgagaaatcccgcatttatgagcccccagtagagaggccaccattgtacaagcctcctggtagagacacccccagtttacaag

SEQ ID NO: 26475 - DNA, 258 bp, Glycine max
  Clone ID: 701097571H1
attaatagagagacataaaaaataaacatatattgagaatggagggttgtgtgaagaagttgctatgccttgttgggtttgtggtgcttgtgagtactattggtggggtggagagtgctggtgaatgtgggaaatctacaacccctgataatgaggcttataatcttgcaccatgtgcctcagcagcacaagatgagaatgcctatgtttctcagagttgctgtgctcaggtggaagataattgggcagaacctagtt

SEQ ID NO: 26476 - DNA, 256 bp, Glycine max
  Clone ID: 701097572H1
atggggttgaattggcatcctctaattcctcctctgttggagatatttcatcacctgctgcatatgattatattttgacccaaggaagggcatgggcaatttctatcacacagaaaagtacaagaaatgaagagatttctagagcatttataagcaatggaggtggaatggataataaccttctttatcgttcatccactcatggaagaggccttggcagattttggtctcatgttgaaggttacaaaggtccttt

SEQ ID NO: 26477 - DNA, 257 bp, Glycine max
  Clone ID: 701097544H1
cttttggaccagccaccacctcagcgccgcttaaggaccacaaagttcagatcccaagcttccatggcttgacgtcttcctccgcctctgctctcccccgcaatgccctctcccttccttcatccactcgctctctctccctcatacgtgctgtttccacgcctgcgcagtctcaaactgccactgtcaagcgcagaaagtcgaaatattcaaagatcaaagcaatttcataagatgtcctcttaacgaggacattt

SEQ ID NO: 26478 - DNA, 264 bp, Glycine max
  Clone ID: 701097515H1
gtgccgcactctcgctcgcagttacagaaaccatgacgacggtggtgcccacctccgaagaagacgctgctctctctgttgtccgattcgcctctgaactcgcctgggccgatgccggtcccgaggttgctgagcctcaagttagtagactctgcatggaggctgaagagtttatcgttatgggaaaatggttggaactagcatcattgatgattacctctgctgaattggttttctcaaaggtttctgaaacagatatagagt

SEQ ID NO: 26479 - DNA, 264 bp, Glycine max
  Clone ID: 701097516H1
tccttgtgatcttcttcaaccttcagagttgagaaactcattcagaaaccacgtttctctcttcttcttcttcttcttctttttcttctctcgaggtcattattaagtattcaccatggaggcaccatctcccaccaaacccaacgacccaacaaaaccttccaacacttccaccacccttagtctggaggccggcccggcacaagcgagccaatccgaaaaatgtttgcgtggcgtccatcgccgccggcatacagttcgggt

SEQ ID NO: 26480 - DNA, 264 bp, Glycine max
  Clone ID: 701097518H1
atcaatccaaggcttcctatttctccaaagcttctgctctttcatctggggcatgtgggtatggctctttggcactagacataagtggtggacaccttgcagctggtgtggattctctcttcaaaaatggagcaggttgtggtgcctgctttcagataagatgcaagaacccaactctatgtagcaaagaaggtaccatagtggtattgactgatcttaatcacaacaatcaaactgattttgtgctaagcagcagagcctttg

SEQ ID NO: 26481 - DNA, 238 bp, Glycine max
  Clone ID: 701097519H1
caaatcaatagttactataccgggaaaaacacaatagaagagtcttcttccccaatctcgttagccgttacggtttacggacagagacagagggctgcgctgcagctgcagctgcacctgcagaatcttttatcagcgatagacgcaatgtcttcgtcgaaagatgcagacccaagcctgggttacctgactcgcaacgacacggaggtgaagcttccgagtgcaaccagggtcaaga

SEQ ID NO: 26482 - DNA, 233 bp, Glycine max
  Clone ID: 701097520H1
tgacatttaagcgtcacctaaccttcttcgtttgctttttaaataattctgcattttctcgcttctttgatcactgcttcgcaaattgatcttcgtcgacgaattgtgcattcctgtgctggtgatgggtatggtttggatttcaaatgtcttacttctcgggtaatgagatgcatcaaggttttaagcacattgatcacggattgatattgctgctctgtgaacttctgggg

SEQ ID NO: 26483 - DNA, 258 bp, Glycine max
  Clone ID: 701097521H1
aaaacaaactttgtgtagttaaaaattagaatgatgaaaaacaatagcccacaagattggcctgagccaatagtcagagttcagtccttgtccgaaaggtgcacagattcaatccctgagaggtatatcaaacccctcagtgaccgtccatctgatgatgccgttgctgttgatgatgccaacatcccaatcattgaccttgcagggctttatggtggtgacccagatgctcgagcctccacactgaagaaaatatct

SEQ ID NO: 26484 - DNA, 242 bp, Glycine max
  Clone ID: 701097522H1
cgcgcgctccccctttcttcttctcctggatctgctaggagaagtgctgcatgctctgaacttccttccatactcttagagatggcgtcttcgtatcccggttccgttagtgccgcgcaggttggttcctacttcgtacgacagtactaccagattcttcgccagcaaccgaatcttgttcaccagttttactccgattccagcagcatgattcgcgtcgacggacattcacttgaaaccgc

SEQ ID NO: 26485 - DNA, 231 bp, Glycine max
  Clone ID: 701097523H1
cgacaactgcgccgcgctggaggagctctcagtcaagcgcctccgcggaatcaccgacgcggcggcggctgagccatcgagtcccggcgtggctgcggcgtcgctgaaaatcgcttgcctgaacgagcactacaacggacagtgtatcggaacgctgattgccggggctaagaatctgaagaccttgaagctattccggtgctccggggattgggaccgggcctttcagtt

SEQ ID NO: 26486 - DNA, 262 bp, Glycine max
  Clone ID: 701097524H1
gcttaattaccccctttgtctctctctctctctctctctccacaacgacgccgtatagatcttcttcttcttcgacgtagtaacagagcgcgcgcgttgattcaaaccatagcatggatgagacttcagctctcatcgatgccattctcagagagcaagagggagaagtagaaggagctcacagaagatgaaggaagcacaccacgtattacaccacaatcagaagtatgagccattggcagacggtgtcatatcacaagag

SEQ ID NO: 26487 - DNA, 254 bp, Glycine max
  Clone ID: 701097526H1
caatcatcttttgtttgttcttcagtactttagtgtgtgatttaattccaagattttgagaatgtctagctgtgggtgtggaagtagctgcaactgtggcagcaactgcggttgcaacaagtactcttttgacttgagctatgttgagaagacaaccacagagactcttgttttgggtgttgggtctgtgagggcccaattggagggtgctgaaatgggtgttgcagcttagaacggcggctccaactgtggat

SEQ ID NO: 26488 - DNA, 237 bp, Glycine max
  Clone ID: 701097527H1
cttctctctttcaccgataaaacaaactaaattcttcttctttctcactgaaaacgatagtaatggcgacgaatccaatcgaagcggggaacggcgacgcgctcctaaccctaacgcgactaccaaaccctccgtctacctccaagacacggaggagctgaagcgagtcttcagccgcttcgacgctaattgcgacggcaagatctccgtcaccgagttggacaacgtcctccgctc

SEQ ID NO: 26489 - DNA, 261 bp, Glycine max
  Clone ID: 701097529H1
caaaaacctcagtaccaagaaccctatgccttgacaaaccctaacgttgatttaaatcgtttgttcgcacttcaatctccaagtcataaatacactcttctctccccattcactcgcattggcttttggtagttgaagtctttcattgttgtcaaattcagatcaggcaagtgatagcagctctggggttcgagggctagaatcctccgaagaattcaagagaagagggaaacaattgagagaaaagcatgatcctaacag

SEQ ID NO: 26490 - DNA, 260 bp, Glycine max
  Clone ID: 701097530H1
cgaaagcgaggaagttcgatattgaaaaggcaaaacatatgtggactgacatgctacaatggaggaaggagtttggtgctgatactattatgcaggattttgagttcaaggagttagatgaagtcgtgaagtattatccacatgggcatcatggcatcgacaaggagggaaggcctgtttatattgaaagacttggaaaggtcgatccaaacaaacttatgcaagttacaactttggataggtatgtgaagtaccatgtg

SEQ ID NO: 26491 - DNA, 256 bp, Glycine max
  Clone ID: 701097533H1
cggatcgcgcattcacaaataaggttgaagagggccctgccggaagaagataaataccgtctttcattttccggcgatctctttttttcttccatcaccgttttccggctatccctaatccttaacagatatgacgacatcaaggcgccttgcggacaggaaggtggagaagtttgagaataacatcaccacaagaggatttgtgccagacacaaccactaaaaaggggaaagactaccctgttgggccagtgctg

SEQ ID NO: 26492 - DNA, 238 bp, Glycine max
  Clone ID: 701097534H1
gagcccttgtctgtgtttgttgacacttatggcactgggaagatccctgacaaggaaatcctcagcattgtgaaggagagttttgacttcaggcctggcatgatctccatcaaccttgatctcaagaggggtggaaatggcagggtttcttgaagactgctgcatatggacaatttgggcagagtatgaccctgaatttcacatggggaagtggttgaagccactcaaggggggagaa

SEQ ID NO: 26493 - DNA, 251 bp, Glycine max
  Clone ID: 701097535H1
actcgagccgaatcggctcgagaattaacactaataacagcaaactaaaggtgaagtttgccacaaacaagatgggaaggaaccattttcagcagcaacactgtgctgatgggagcatgtggatggagagtcagggtcagcaacagagctatgccttccaagaagagtcttggaggcctgataacaactatggccacaaccacaagcaattcccaggcatgcacatgaacatgaacaacaacgacaacaac

SEQ ID NO: 26494 - DNA, 258 bp, Glycine max
  Clone ID: 701097536H1
cgcctcttcaacaacccttgttttgttctgtgcaagtgatcttgaaaggaacaacaatggtgaagtctataaactttctcctgcttctgtctctactagcctttgttccctcctgtcactgcaaaaagaaaataggaggttacctctaccctcaattttacgacggttcatgccccagagctcaagagattgtccaatccatcgttgccaaggctgtggcaaaagaaccccgaatggctgcttcgttgctcagactac

SEQ ID NO: 26495 - DNA, 258 bp, Glycine max
  Clone ID: 701097537H1
caccagtttcaccgcacgaatatcttgttgtttggagcgatccgagaaaaactctgtaaacatgttggtttaccaggacctccttacaggtgatgagcttctctctgactccttccgttacaaggaaattgagaatggaatgctgtgggaagttgaggggaagtgggttgttaaaggagcagttgatgtagacattggtgcaaacccttctgctgagggtggaggagaagatgagggagttgatgatgcagctgttaa

SEQ ID NO: 26496 - DNA, 245 bp, Glycine max
  Clone ID: 701097538H1
ctcactgttagtagcagcaatggcgaagggtgaagacgctttgattcgaaagaagaataacaagcttcgaaagaagaacagcagcggctcttcctctgtctccgccaaggttgccgacgttatcgccgccaacaagcgccgcaagccggtaaacgccgcatgtgccaggggatgtgctttagtctacctactctggatgatcccttcaatgatccgagtgggaaaaaggaaccaaaacaaagggt

SEQ ID NO: 26497 - DNA, 255 bp, Glycine max
  Clone ID: 701097540H1
gtgaaagagaatccgaggcgaagagaagagaaaaattaagatggaggggaaggagcaggatgtgtcgctgggagcgaacaagttcccggagagacagccgattgggacggcggcgcagagccaagacgacggcaaggactaccaggagccggcgccggcgccactggttgacacgacggagtttacgtcatggtccttttacagagcagggatagcagagtatgtggccacttcacggtttccatacatcactgt

SEQ ID NO: 26498 - DNA, 256 bp, Glycine max
  Clone ID: 701097541H1
gcggcaacagaggagagaagatgaagttcaatccacgagtgtcgagcagccgccgcaagagccgaaaggtcacttcacggcgccgtcgagcgtgcggagggtgctgatgagcgcccctctgtcggcggagtccggtcgaagtacaacgtgcggtcgatcccagtccgcaaggaggacgaggtgcaggtggtgcgcggaacatacaagggtcgcgaggggacagtgacgcaggtgtaccgtcgcaagtgggtcatca

SEQ ID NO: 26499 - DNA, 257 bp, Glycine max
  Clone ID: 701097542H1
gcaaaagttgggtctcaaacctgagaagatgaaggccactagagatgtgcttagtgaatatgggaacatgtcaagtgcttgtgttcttttcatcttggatgagatgaggaggaaatctgctgaaaatggacataaaaccacaggtgaaggacttgaatggggtgtgttgttcggttttggacctggacttaccattgaaactgttgttttgcatagtgtggccatctggagatgcctcatatattatttcattattg

SEQ ID NO: 26500 - DNA, 261 bp, Glycine max
  Clone ID: 701097513H1
acctcctagttatgtttttttcacagtctttctacgatttgtttgagaaccctgcaatattgggtttgtgctcagttattggaatgttttttagtcctctgtgggtaacatttttcttcggtgtcatcgttggatggttgtggaaaccgaaatgggcgaggttggggaaagaaaaattgacgacttccctcgccaagtccttagattttgcctcaccctcctcggcttcttcaccattaaagtctgctctagtttctccta

SEQ ID NO: 26501 - DNA, 77 bp, Glycine max
  Clone ID: 701097471H1
ctcattcgtactcaatagcttccttttcagcactttcactatagtatacttctgactctgagagattctctcttcga

SEQ ID NO: 26502 - DNA, 239 bp, Glycine max
  Clone ID: 701097472H1
cgagcccgtgcccatggaattgacgggggaggagaaggacgcagagcagaagaaggctgaggctctgaaggaaaaggaagcgggcaatgcagcgtataagaagaaggattttgataccgggattccacaatacaccaagggcttggaattggatgaagaagataattcggaacccaataaacggggcggcggccaattgggaattgggaaggtagaaggattcattaaaggatgggaac

SEQ ID NO: 26503 - DNA, 224 bp, Glycine max
  Clone ID: 701097473H1
cccttacagagttctgtactcctgagaattgtcggacgatgtctgcaggacccaagtatggcatatttaactgtctgatttccttgtttacatttcctttggaggggaaaagcatttgtatgcttttagaaattcagtcggatgataatccttcaaatatccttgcagttgaattgaatgaggaaattaatcagcttcttgaaacatgtggggtgtggaatgaa

SEQ ID NO: 26504 - DNA, 227 bp, Glycine max
  Clone ID: 701097474H1
ctcatttcccagatcatttcgtcgctaaccacttccttgaggtttgatggcgctatcaatgtggatatcactgagtttcagaccaaccttgtggcataccccaggatccacttcatggtttcttcttatgctccgggtaactctggcggcaaaggctaccacgagcaattgtccgtggcaaagatcacgaatgccggggttgaacccgcgaacatgatgggcaaatt

SEQ ID NO: 26505 - DNA, 194 bp, Glycine max
  Clone ID: 701097476H1
gctgaaccatcttctgactcagccaaagtccaagaactgagtgtgtatgagatcaatgagagagatcgtggaagccctgcttatcttagattgagccagaaaactggtcaattcccttggtgacctagtccccttcagcaataaagtgtaatctggatgtttgccaaagaaggtaaggattacagctggaattt

SEQ ID NO: 26506 - DNA, 252 bp, Glycine max
  Clone ID: 701097477H1
cacaaatcattaatcaaccaccaccttaacacaacaacacgatgatgtccatcttcagccacttcgagatcgcgcaggcccagaactggagcttttctttgctcccagtaaaaagcacgaattcgaagcccaacacagaagccacttcctcctccgctgagtccaaaaacggcagaaaagtttccaatctatcacaacccggtggattcaagcaaaacccggcccggttgagggccagatttgcggcggagt

SEQ ID NO: 26507 - DNA, 257 bp, Glycine max
  Clone ID: 701097478H1
atcaggaccctactggtcttgcatgcagccaaggaaggtacttacagttagttttactgaacctaacaaattgctgtatcgtatatatgctaggcacacagattttgaaaccaggttttacaataatagctgatcacgagatgaaatgccttttgttattcaatcgtggcacacatagtatccaggatactctaacagctggtacaggaaatgtgatatcaggctgaagctggtggcaggatctgctgaaggatatt

SEQ ID NO: 26508 - DNA, 256 bp, Glycine max
  Clone ID: 701097480H1
ccgcgctttagaatccccacgcactctccctgaagatagaacaaacaaatcaagcattccatagttcttagatagggcacgcttctctcccttgcgccgcctcacaaaaggttattggcctattattgtctgaagatcgttgatggccatgatactgataagaacattgaggtgtggaaaatcaagatattgatcaaagctcttgaggctgctagaggctatgggacaagtatgatttcccttatcatgcctccac

SEQ ID NO: 26509 - DNA, 244 bp, Glycine max
  Clone ID: 701097482H1
ggaaaagcaagattttcagggaaggacttagtatctcccaattctcaggcaaggacactccggccacttataaatagcaaagcaacctttccaaaaccatggcaaccccacctccaatttctcctccctttgtggtttcaaatcctttccttggtataataatctccttcaattttgtccaaaccctgggatcggacttgccattcttaatgaggcaaccggtcaattttggggttgaggtaaa

SEQ ID NO: 26510 - DNA, 183 bp, Glycine max
  Clone ID: 701097484H1
ttcgaattcagatttcgcattcaatctttgtaactgacagataaaggcgacaatatctcatctttcctctcacaccatcaacaaaaccaaataatgatgatgcagaacgccacactagcaacaacccctttcggcggtttgctccttaatccctcctcaactggcttccaaggaagaccaacc

SEQ ID NO: 26511 - DNA, 93 bp, Glycine max
  Clone ID: 701097485H1
cggctcgagtggtggtgttgtttctattcctggggttttggcttggtatgttgtctggtcgaccatttcatagcaggatatccgtataattgg

SEQ ID NO: 26512 - DNA, 80 bp, Glycine max
  Clone ID: 701097487H1
aaacctttccctcagcaacggaatccaccaaactctcgcatcaatcttcgtatctttagagagagagagagagagagaga

SEQ ID NO: 26513 - DNA, 208 bp, Glycine max
  Clone ID: 701097488H1
gtcagttggcagttttttcttagaatgaaaatgtcgtctaaggtcactagtgccaccctttgcctagcagtcttattcctcttcttaaccttcacatatgcaggcagacttggccccgcaacttcccctatcaattcaatcaaaactccacaagggggtttggaagaagagaaattggaacgtgaagaaacttgtgaatggaatgggg

SEQ ID NO: 26514 - DNA, 249 bp, Glycine max
  Clone ID: 701097490H1
accgaacaatcgcatatttctgttctgccttcttctactcaatacattacatagctctagtctcgtttccaggtttgtaataataataattttagtttcttcgttacgcctgcgttgtgcgtgagaaagtgcgcgtggatgtaaccatggcttctcagctcctgagacgtaccttcgggagtcgcattcttgccaacccttagggcttctacttcttcttcggatgtttcaattcggatcggggcaatc

SEQ ID NO: 26515 - DNA, 255 bp, Glycine max
  Clone ID: 701097491H1
ggaaatcctttgtcttgtgctcgatggtatagagcacaagtattcagcttcttctcctacccagaaaggttgaagttagatgagaaagaaattaacactagtgatttttggaagagacaaatgattattgccagtatgcataagcgacctgccagttttgggaattatgtgcctgccaaggatgaagctggcattgaagggggccatatcagaagggaaaaggtctctcggcttgtcagtattaaaaatggagag

SEQ ID NO: 26516 - DNA, 219 bp, Glycine max
  Clone ID: 701097492H1
cactcgagccgaatcggctcgagttctgattgaccttagtccatgggcacatgcagcggcggcggacgaatcggcagcaccacctactccgacgaccatccccgccgcaacggcatcaccgtcctccctccgaactcgaaactttcaaccccaacagcgacctccttggtgggccggcgcattgaagacatgcgaaccatttacatattcgggcgggaa

SEQ ID NO: 26517 - DNA, 256 bp, Glycine max
  Clone ID: 701097493H1
ccctctcctgagtctcataatattagttgtataagctagcaattcatttgataatttctgtatcgatcaaaatatatatagatatatttcttcgatatatatatatagcaatggttgcgccttgtccaacatccatgatggtaagaaccaagaaaacaaagggcatgggagttccgacaatagacctttcaatggaaaggtccaagttgtcggaactggtggtcaaagcatgtgaggaatatgggttcttcaaggt

SEQ ID NO: 26518 - DNA, 258 bp, Glycine max
  Clone ID: 701097494H1
tgcttcccgaagaaggagtagcgtagaggaagagtgcgaaagaaagatcgttctcgatgacagaggggaacggtgacaaaactctgcgaaagatcgcagacgcattcaatgaccttgcaaacgttttcaccgattctcagagcgcagaagcagaggtcaagggtgctcccttctctcatgcctgctctctcgtctcccctctcttcggttgcttgggcgtcggcctcaagttcggcgaaatggattacgtcgccaaag

SEQ ID NO: 26519 - DNA, 256 bp, Glycine max
  Clone ID: 701097495H1
cttatcttagctaccccatcacaacaaccacgatactatttctcatactctattaggcaaaaacaccaccaaatgggagaggaaaaggagcagcctaagaatgacaccgagaaaaagcccgaggaggtagcccccaagaaagacgacggacccatccctgtcgtttacaaactcgacttgcattgcgagggatgcgtcaagaagatcaaacgcacctgtcgccacttcgaaggtgtggaaaccgttaaggcggatc

SEQ ID NO: 26520 - DNA, 258 bp, Glycine max
  Clone ID: 701097496H1
gttgaatgcacatgctggtctccggtccggttagggcatttctgggaccttaaatcaccaatttctcacccaatcaattccaattaagctgagagtgtttctgatctatatgtgatgggtgctccgaagcagaaatggactgcagaagaggaacaagcacttaaagccggagttgtcaagcatggtgttcgtaaatggcgcaccatactgaaggatccagagtttagtagtgtcttgtacctgcggtcaaatgtggat

SEQ ID NO: 26521 - DNA, 276 bp, Glycine max
  Clone ID: 701097501H1
tctgaaatgcagaatcatgatagacaactatggaagttaggaacactgccaccgggtctcataacattctggaaacgcactttccctctgaaccgatcttggcacatcttaggtcttggctacaaccccaatgtcaaccaaagagatatcgagcagtctgctgttgtacactataatgggaacatgaaaccttggcttgagataagtattcccaagttccgaagttactggacgaagtatgttgactacgatcatgtgtatttgagaggatgcaac

SEQ ID NO: 26522 - DNA, 234 bp, Glycine max
  Clone ID: 701097503H1
cacacgtaaacacattcagacaccaccatgataactctagctccttctcttgatactccaaaaactgatcacaaccaagtttctgatccccaaactagccatgtcttcaaatcaaaattaccagatatcccaatctccaaccacctccctctccactcctactgcttccagaacctctcccaatttgcccaccggccttgcctcatcggcggacccgcgtccaaaccttcacct

SEQ ID NO: 26523 - DNA, 258 bp, Glycine max
  Clone ID: 701097504H1
gtggcgtctcatgcccatacatctgcggcaagcatttggatcatggggttcttttggtgggctatggatctggtgcttatgctccaattcgttttaaggaaaagccttactggatcataaagaattcatggggggagagctggggataagaaggatattacaagatctgcagaggtcgcaatgtatgtggggtggactcgatggtctcaactgtagctggtatacatgtctctaaccattaaatataaggatggatgc

SEQ ID NO: 26524 - DNA, 241 bp, Glycine max
  Clone ID: 701097505H1
cgtttttcgtttattccttctttcatccattctactttcttttcctctcgctagtgtttagtgctaggtgattgattaacttagaaggactttgtgtgttacaagaaaacaagggcaagtttcatgtctgaatttgacacgaacatcccaactggttttgatcccgttgctgaggcaaatgctgaggactcaggtgccgggacaaaagagtatgttcatgttcgtgtacaaaagcgcaacg

SEQ ID NO: 26525 - DNA, 251 bp, Glycine max
  Clone ID: 701097506H1
ttctcactctgtcacttgacaaagcctctggctcgggtttccaatccaagaacgaatacctttttggcaaaattgacatgcaactcaaactagtccctggcaactctgctggcaccgtcactgcctactatttgtcttcaaaaggagcgacatgggatgagattgactttgaattcttgggcaatttgagcggcgacccatacatccttcacaccaacgtgtttagccaaggcaagggaaatagggagcac

SEQ ID NO: 26526 - DNA, 228 bp, Glycine max
  Clone ID: 701097507H1
aatcgagccgattcggctcgagctcagctaacctcaattttatgtataatcgtccctggtaaataggctttttagatattaacatacagcatcgttttctatgatgatcacacagtgccataatttggatttctagcgacagcctatcgtattacgaggttaaagttcatgttttgtttcctcgttttgatgcactgattttataattactttatcaactgttcatgc

SEQ ID NO: 26527 - DNA, 100 bp, Glycine max
  Clone ID: 701097470H1
gaaatagtcagaaagatgacttccattgtttcaggtttgcaaggccagcctccacaaggacatgaacatggatacccttttgtagctggaaggaaaatgt

SEQ ID NO: 26528 - DNA, 258 bp, Glycine max
  Clone ID: 701097508H1
aaagcattccaggttccattaagaagctgcagcagttggagacattagatcttaaacacactcatgtcactgtattgccagttgaaattgtggagctcccaacgattacgccatctcttggtgtatcgctatgagattgaatcctatgctaatttacattcaaggcatggcttcaaggtggcttgccctataggacttatgcaatctttgcaaaagctatggtttatagaggcagatcaggctttgatgattgagcta

SEQ ID NO: 26529 - DNA, 259 bp, Glycine max
  Clone ID: 701097511H1
gaaagtatccaaatgggcatcgattgaacagagcgacgaataatgggtattggaaggcgacggggaaggatcgtaaaatcaagtctgggacgattttgattggaatgaagaagactttggtgttctacactggtcgagcacccaaggggaataggaccaattgggttatgcatgagtatcgccccactttgaaggagcttgatggtaccaatcctggacagaatccatatgtcctttgtccgttgtttaaagaaacatg

SEQ ID NO: 26530 - DNA, 244 bp, Glycine max
  Clone ID: 701097437H1
attttctcctaactttgagagcatgggtaacttctatttttttggcgctgtccccttctccatcatctttacttcaacctttaaacttcctttttcaactattaaaattcctgactatgttgagggaattaagaaaatggggttggtggcggtggcaaccggattggaagtccccaaggtcttaacggtaagcggaaaccgggtgtaaccgggttaggacggcaaggaacaatccccagttttg

SEQ ID NO: 26531 - DNA, 251 bp, Glycine max
  Clone ID: 701097438H1
gttctagatcgcgagccgccgcccttttttttttttttaaaccaaagtttaatctttcaaaggctcaaacctaccatgttataaaaaaatccggggcgaaatcaaaattttttttccttttgggctaaaaacatttcgggttaaaaacctgggggccaaggcttgaataatttcaactgcctaaacccccgaaaaaaatggcttaacctttcaaatcctcgggtttggccccatgaaagcgggctggaatc

SEQ ID NO: 26532 - DNA, 209 bp, Glycine max
  Clone ID: 701097439H1
ttttgtgattgagttagacacaaattcaaatcctaagagtaatgctactacttataatatggtttagtgtgtgaaaatgatgattccaagtggttaaacgtttcaatcaatgcgttatggacgttgatctggggtgtggttgatgatctaagccagagtgattggggttaatttgaaataatgataataattttggaaggaaggtattt

SEQ ID NO: 26533 - DNA, 53 bp, Glycine max
  Clone ID: 701097440H1
caacgatcggataatttctcttgaactacagctgtgtgcgtcagagatgacgt

SEQ ID NO: 26534 - DNA, 239 bp, Glycine max
  Clone ID: 701097441H1
ccgggagctctcagctcactaacaccagctactactccctccccccaccccccactctctcacaaaatgtgccagggcctctccgccccatcgccggcgtgttcggcgcttctctccttcacgctcctccttctccttctctccgtggttgggccgggttcgggaatggcggccttggcccaagagcacaaaatggaccttcacgattaatccttcgggggcttccaggaattccaagg

SEQ ID NO: 26535 - DNA, 247 bp, Glycine max
  Clone ID: 701097443H1
agaacctgagttcccactccgattggagacaaggtctcgaagtcaagccatttggaggcggccatcagagaggcatgttcctaggatagtatcttctcctgttgttgaaacaagagctgatctttctgctattgaaacccagggtcggaatttgggtgaagggttgaagaactccgatggtgatactccaagggaaggaacagcaggacttcggcttcctggtaaggaccatttgggttatccgatt

SEQ ID NO: 26536 - DNA, 105 bp, Glycine max
  Clone ID: 701097444H1
gtcgagcaattcgaagaagagaagagaaaagataaggaaataggttaatggcatcactgggatctccgtcttctttctggtgctaccgctgcaaccgcatagtta

SEQ ID NO: 26537 - DNA, 256 bp, Glycine max
  Clone ID: 701097445H1
gtggccttttccctctctttctctggaaaattcccccgattttctcgagaaagtgaaacggaattatgagctttcaggacatcgaggctgggcggcccttcagttcgaggcgcgggttgatgaacgggaagcacagaccgacgcaagcggtggctgccggaatattccagatcaacaacggcggcttcaacttccagagactcgtcaacaacctcggaaaccccaaagacaaccccgaacttcgggaaaaacttca

SEQ ID NO: 26538 - DNA, 256 bp, Glycine max
  Clone ID: 701097446H1
ctcaaaccgagagaatacgctgccttgaaggactgcgctgaagaaatcagtgacagcgtcgaccggctcagccggtcgctgaaggaactcaaattgtgtaaggtgaagggtgaggacttcacgtggcacatcagcaacgttgagacgtgggtgacttcggctttgaccgatgagagcacttgcggcgatgggttccccgggaaggcgctgaatgggaagattaaggaggcgattagggctaaaatgggccatgttg

SEQ ID NO: 26539 - DNA, 262 bp, Glycine max
  Clone ID: 701097447H1
cggagcaacttttccaaagaagagcaacaagctctgcagacatggaaccaattgaaccacttaattgataatgttcagggtttacccaatgcagcagaagctatcaaggaggctgccagtgcatggaatagctttatttcctcaattgaagagcaaaaacaaggtcatggaaatgatagttcaagagctaaagagaagcagtgtccccattttcttaataaaatgaattccactgacttggtaatagtagttataaactgcc

SEQ ID NO: 26540 - DNA, 87 bp, Glycine max
  Clone ID: 701097450H1
atcgcgtttacgcaaccccgtggacgcgaggcacaccaacagcagcaacccgctactgctgcagtgtggtggcagttgccatgcttg

SEQ ID NO: 26541 - DNA, 233 bp, Glycine max
  Clone ID: 701097451H1
tggcaggcacgggttcaagatatggagacagagtcatttattcgaagcaataacaatacgaacataatgtctagtgttagagagaaataccgggtggatggagcggagttgttgaaggccaatttcgataacgcgttggaaacaacgaccttgaattttgtggtaaagttggggtattcgaaaccggctaaggtcctgaaggtcccaggttaaggaggatcttcccggtccgg

SEQ ID NO: 26542 - DNA, 225 bp, Glycine max
  Clone ID: 701097452H1
cgaaatcttgatctctctgctgttgtgttttgttaatctcattcagacaatcacagttatactctctctctctcaatttgaacactgatctcatctcaattttcagatatgtcgacatcttataagcccggagaagttgaaacggggtacaaaggttaaaaaccccaaggaggttgttcagcaggaggggaaggttggttcaattgagaaggtgaaggtttccat

SEQ ID NO: 26543 - DNA, 219 bp, Glycine max
  Clone ID: 701097453H1
cgttggtgcaaagcatccttcgtttcaatttctctctctcagcgctttctgcaatcgaacctttcatctccaaagggatccacaggccgaaggagatatggggctgaccatcacaaagcttttcagtcggcttttcgcgaagaggaaatgcgattctgatgggtggtcctgatgctgctggtcagacactatcctgtacaagctcagctcggagagatc

SEQ ID NO: 26544 - DNA, 254 bp, Glycine max
  Clone ID: 701097454H1
tcttttctcggaggatgaactcctccgagaaaagatattccgacacgagtgacgaggcgtgtcgggagtgggggttcttccaggtggtgaaacatggtcttaagcatgagttgatgaaaagttctagggaactgtggcgcgaattccttaagcaaccaatttagcttcaagaaggataatccaaattccccaacaactattgggggcaatgcaatcggtttggaattgaaaaatgttgcaactttgaattggat

SEQ ID NO: 26545 - DNA, 225 bp, Glycine max
  Clone ID: 701097455H1
ctgggatctgcttccttctcttctctttctcaattctcattcataattctaattcattcctccgatctgcgactttctatttctccctcaacacaacacgagaccacatgttcctctttgactgggtctaatggcatctcgccttcctccgtctttgggaaaaaggaggccaaattctcctccttgggcccggttattgcgggcaaaccgaccttcttcaacatg

SEQ ID NO: 26546 - DNA, 247 bp, Glycine max
  Clone ID: 701097456H1
aactcggaattgagctcaagagacaattatccagttcaatgatcgattcccctactcacaaaaattaagatgcaatccatttctttgttcaattcctcaccaatatcattccatccattttctacatctaaggcaatgtctaatggcagcaaatgaattcgttgtacaactaggcttcatgagagatcgcgatcgaactcatggaaggtgtgatgaagctgatatctgagagaggtcatagtgacat

SEQ ID NO: 26547 - DNA, 251 bp, Glycine max
  Clone ID: 701097458H1
gtgaaaatggcggtacccttgctctccaagaagatcgtgaagaagcgcgtcaagacgtttatacgcccccagagtgatcgcaagatctccgtcaagccaagctggcgcagacccaagggtattgattctcgtgtcaggagaaaagtcaaaagatgcactttgatgcccaacattggttatgggtcagaccagaaaacccggcattatctaacaaatgggttccaggaatttgtcgggcccaatgtggaaga

SEQ ID NO: 26548 - DNA, 255 bp, Glycine max
  Clone ID: 701097459H1
gtcaaaaccgctttgattttattgtcacggtgacaattgccattggagaaactgtaacttttgctgtacctgatgatgatcttcctttcatctcatatggagaatggattcgttaccttcttcttgcaagaatgttgagattaataaggatcctaatgtatgtcaagcgataccgagcctttgtgggaactttaatgactctcataccaagtttgatggcataactaaggatcataatttggaacctgggtaatt

SEQ ID NO: 26549 - DNA, 254 bp, Glycine max
  Clone ID: 701097460H1
gcttgagcaatgctttgagacgatatggtgtatgactactgggaaaagttatgctgtcactaccctgtgccaatttaatttgaacctctgggatacctttggtcaacgactcaatgtttgtatgtggaagcatggtttttcggggacatagatttaaagtctagtttgtggggctaagaatgttgaggatagctaatggtgtgtttctagtaacgaggtggtaaacgctggctgtcggtacatgataatagctg

SEQ ID NO: 26550 - DNA, 235 bp, Glycine max
  Clone ID: 701097461H1
ggagaacaagatggttataccaacaaaaaagatctagtcctagaatccaacaggggcgacctcacctccaagaacacatagccatgtcaagaaacttgcttcatgttctttttgcagtagccaccttcctccatggctcagaagctcaaaccagacacgtggtagggtgatggcaagggctggaataatccttccggcggcggcggcaactaaaacaacttgggttccaacaaaa

SEQ ID NO: 26551 - DNA, 200 bp, Glycine max
  Clone ID: 701097462H1
ccttcgagccgaatcggctcgagcggctcgagctcttcagatctctctcccttccttccatcacaaccacaaggttgctgagcagacataaccatggtgagatttgctgcattgagctgctatgtggtagccaacatggctgattgccttgatgtctgagacgaagtgtcgcgtgacattgctgcacgcgaatcacgcgt

SEQ ID NO: 26552 - DNA, 261 bp, Glycine max
  Clone ID: 701097463H1
gtgggcttcagaggaatttggattcatcacaccaagcgactctgtttcaaccggaagtagtataatgcctcagaaaaagaatccagatccgatggaacttgttcgagggaagtctgccagggtcataggggatcttgttactcttctcacattgtgcaaaggacttcctcatgcttacaaccgtgatttgcaggaagaccaagaaccagtgtttgacagcgttaaaacaattttggggatgcttgaagtatcagcagaatt

SEQ ID NO: 26553 - DNA, 73 bp, Glycine max
  Clone ID: 701097465H1
ccctcctcctccctacaagtaggcatctcctccacctcccccatagaagtactcatgtccaccatcccagtct

SEQ ID NO: 26554 - DNA, 258 bp, Glycine max
  Clone ID: 701097436H1
ctgaaactgcagaacactttacgaacgttctgccactgggaattgggcattcttcaacaaatgagaatgaacaggtattcctatttgaagaatcctaactacaccactgtacaagggggttcaaccggggttaaattagcccaacttaaccaatgaaaccttaaattggggccacctttattgggtatgacccccgggccaagcttcctaatcctccggatccggtaatggttatcccaggaaccttggataggaggg

SEQ ID NO: 26555 - DNA, 223 bp, Glycine max
  Clone ID: 701097467H1
gagaagaaaagtcaaagacaatgtcagggatcattcacaagattgatgagacccttcatgtgggaggccacaagaaggaggatgcacacaaaggtgaacagcaacatggtggaaaactaaaaagggcagaaccatggtgaccccagtattgattccaaaggaggcctccattttggtgaccccaagccggacaaccaggaagaggattaccccaaaaaggggt

SEQ ID NO: 26556 - DNA, 257 bp, Glycine max
  Clone ID: 701097411H1
ccgctcgagctcaacttgagaattttccccaaaaatcccaagagctcgcgccatggtttccccggacaacagcaattggctgttcgattacccgttgatcgacgacgacgttattcccgtcggcgactcctccttcagcgtctccggttccaacttcttcttgtccccacctcccggcaatgttagggttgaaattgattgttcggcttggggatcttgacggcttaaaaattcctgtttggacgaaagggcttaat

SEQ ID NO: 26557 - DNA, 265 bp, Glycine max
  Clone ID: 701097412H1
tgggtgttgatctttggttgaagattcaagaggaggcaaggttagatgttgatcaagaaccaattttatccagctactatttcagttccattttgtctcacaaatctttggagagtgccttgggcaaccacctctccacaaatttgagcaagctgagccttccaagcagcaacctttttgaccttttcatggggggtttgggtgatgatggaggtggtggcatcgtaagtggtgtggagggtgaattgataaccggtaagggggg

SEQ ID NO: 26558 - DNA, 259 bp, Glycine max
  Clone ID: 701097413H1
ggccatagtcatagataaaaaggaagtgaagagactagaaccaaacaaaagaaaggtccattatggattactctgatgatctctctacacctttgctttctcgaagtctcagcttgccttgtcggaattccctcctgttccggtcatcacacttctttctctgggcaatccctcagattcaacctctctagctcattcccaacaacaaacttcaagggttcaaaatacataataaatcataacggggaaaccagaaaag

SEQ ID NO: 26559 - DNA, 257 bp, Glycine max
  Clone ID: 701097414H1
tctaagttcggctcgagattgcctggttctcgatttccttcctttctcttagtttgtgttgtcgttgtgaagtcgcacataatcttcttccttctcgaatttcctctccttcgacgatgcttagggattcgcgtcgtgcaccaacgcgcgtggtttctcttctcttcacgaatttggggtcgaaagttcgaggttagcctgccggcatgtccatgagtgagcggaagactttttacctagatcaaggatgggatttt

SEQ ID NO: 26560 - DNA, 241 bp, Glycine max
  Clone ID: 701097416H1
gctgacctgacaatgattataggagccatgtatgctgctgtcattcttgttcgcattaacaattgccaaactgttcaaccaattgtagccgttgaaagtacagtggtctatcgcgaaagagctgccgggatgtatgctcctttggcttatgccctagccccggggagcagattgatttacttcaaagaataattttagtttctagtgttcaatgcttgttatgacgtcaatgccgtgttac

SEQ ID NO: 26561 - DNA, 253 bp, Glycine max
  Clone ID: 701097417H1
ctctcaaatacatagaagatattcttctcaatgtggcagctcaagtacctgacagtggtccttgcgtgacttatcttggtaaaggtgggtctggtaattttgtgagagagattcaacaatggaatgagtaatggtgaattcagctgaattccaaaggcttataaggtccggaattcagttggaaagtggtcaattgaggactaacaaggggcctcctcggattggaccaaggaagacctccgaagttcccgga

SEQ ID NO: 26562 - DNA, 247 bp, Glycine max
  Clone ID: 701097418H1
aaacacaaacacttgaagtactaagttagtgtttttgagcaaactatggcttcgttttgttctagattgaccatttgtttggctctggttgtcctcaatattggggagttgcaatgcccaactttctaccaacttctaataacaatccgggtcaaaacttctcttcaatggggaattccccggtgcatttggcaatttcaagggaaaccggattgggggcttttttcttcggctggtccttcaagga

SEQ ID NO: 26563 - DNA, 249 bp, Glycine max
  Clone ID: 701097419H1
tttgatttcaactttgaagtttagttgttttgtggaatggcagcgaagagcaaaatcctagtccttggaggaacaggatacattggaaaattcatagttaaggcaagcggaagagcagggcaacccaattttggcctaattaagagggacaaccttttctaatctggaaaggcttaacttaatgagaggctcaaagggtcctgagttaatcctccttaaggggaaggtaatggtcaaggaaggcttggt

SEQ ID NO: 26564 - DNA, 146 bp, Glycine max
  Clone ID: 701097420H1
agcattgtttacttttcattgattgagccagagctttgtattttctgcgataattttccattgggtggaagacagtctcaacctttattcgaaagagcaaggatctgagttgagttgagtgatcatgtgtggtggtgcgattatct

SEQ ID NO: 26565 - DNA, 252 bp, Glycine max
  Clone ID: 701097421H1
aatcttcagttagcttcttttgaagtaaactttactttttctttttgaataatgtctttttcttgcacagagttctgatcaaacctcctcagcgtactcgatagttgatactccggactaaggatttacagcacaacaataatgaattatgaaatgcctttacggttccaggaagcctggtttgtggtggggatttgccttgaataaagtttgggccgggaattggtgccttgggtaaaaaattggtaatgg

SEQ ID NO: 26566 - DNA, 221 bp, Glycine max
  Clone ID: 701097422H1
gtgttcaaggaggctcaaaaacagcttggctaccaagctgataaagataatgcgaagtcagtgactgacttgaatgtggaagttcctctgataaactgggaccaaatcagtcatccgaataagtatgcagataacaggtaactctcctgcattgggcatggtaatgggtttgaagattgtgaccttgaggttgaattgggtaatgggttaacaacccaggg

SEQ ID NO: 26567 - DNA, 221 bp, Glycine max
  Clone ID: 701097423H1
cacaattcaattttgagcacttaccaacaccacttccaatggcttcatatcatgaagaagaagtgaggctattgggcaagtgggccagcccatttaacaacagagtagaccttggtctcaagcttaagggggttccctacaaattctccggaggaggtctttgtaaccaagatggcgatcttctcaagtaacaacccggtcaaaaaaagggtccgggtttg

SEQ ID NO: 26568 - DNA, 233 bp, Glycine max
  Clone ID: 701097424H1
agacaattttccaattcaattatcgattcccctactcacaaaaattaacatgcaatccatttctttgttcaattcctcaccaatattattccatccattttcaccatctagggcatgttctaatgggaagaaaaatgattcggttgcttcaactaagggtttcaatgaggggttcacgggtccagacttccgttggaaggttgttggttgaaaccttgttattcctgaggaga

SEQ ID NO: 26569 - DNA, 256 bp, Glycine max
  Clone ID: 701097425H1
ggctcgagaagagttcgactacagtatcttgctccatcggaatctttcctcgtttttcagtcgccaatattactgtcactaaatcaattgacaaagcactatcattcccttttacgagtattacttttgatatatgcatgaaattgaaataaaaatcacctaaatcggatttcaatttagataagaccaaaacggatgtgtatggcggatattaggggtggaatcggaactttccggttgaatcgaattttccccg

SEQ ID NO: 26570 - DNA, 261 bp, Glycine max
  Clone ID: 701097426H1
tgaaggcccttaaactttcgctctctctgcttcactttctcgcttttgcattttcttgtgacaaatcaaaatcctcagaacagaaataggtcttcttcttctctgatctaccaaaggttcaaattcaccttagtttgggttacccgtgagtttggaaggtaatgtctgcggcgaagcctggaacgggggagggacggcggacaccggggtgtccggttcttcggaatccctgggctggttcccccaaaatgggggtggatt

SEQ ID NO: 26571 - DNA, 265 bp, Glycine max
  Clone ID: 701097427H1
tgaaacaaagaagaaaaaaaaaactcaaacaccttcaagaacttgtatctttctttgttagtatttgttactacaattttacattcttttcatctctacatatttcattagtcatggcacctcaagcagtttccttcaagtccttcggcggtgctcttattgtggccgttttcttcttcggctccggtccgggcttaatttcgggggaatcgccggttccggcggcggtggcggcaccagatgccggaacagctggattcgtttt

SEQ ID NO: 26572 - DNA, 245 bp, Glycine max
  Clone ID: 701097428H1
cggctcgaggtcttggtcgtcgacgcaggaggcagtagtagcagattgtgaagaagaacgaaactggctggaccttccgcgagacgtggtgtgcacgattttccagaagctgggcgcaatcgaaatcctgacgcgggcccagcgcgtgtggtccgtgttgcggggcatctcgaaagaggctttccttttgcggaacaacgacatgcggaattccggcgacattgaaaccaacttcgtgttcttgg

SEQ ID NO: 26573 - DNA, 264 bp, Glycine max
  Clone ID: 701097429H1
cggctcgaggcagattgacctccattatagtttgttatcatccttgtcttcagcttcttctattggtgaacctttataacctaattactacatatagcaattgtatagctcaattgctaaccttgtgagttctgagcaattgttacaattagaaaaccccaaaacatgggttccttggtcggagactaaaaaggtttggtgaagtgggaatcctagagggctaataagggccagggaaggctaagggtccaaggggctttatta

SEQ ID NO: 26574 - DNA, 266 bp, Glycine max
  Clone ID: 701097430H1
acaaacctgctattggttctcttgtatgagccagcatttattgagatggatggccacccacctgtatcgatcacagcttttaattctcatttaatccgtcatctgaacatactatgtcatattagtactatgtttcttcttctaatttcccaaaaggctaaaattcgggcaattcaagctgaatctttgttcttaatttcagctaaggaagaacgatgaactcatgatattgattagcctctaaaaatggttattcttcggcaaca

SEQ ID NO: 26575 - DNA, 265 bp, Glycine max
  Clone ID: 701097431H1
ataaaaaaaactcaaacaccttcaagaacttgtatctttctttgttagtatttgttactacaattttacattcttttcatctctacatatttcattagtcatggcacctcaagcagtttccttcaagtccttcgccgttgctcttattgtggcgcttttcttctccgcctccgctctggacttagtttcggggcagtcgccggtgccggcgccggcgccggcaccagatgccggagcagctggatccgtgtcgagctcggtcgcc

SEQ ID NO: 26576 - DNA, 265 bp, Glycine max
  Clone ID: 701097432H1
aacaaaaagaaagaatcccaggcgaggagaaagatggaggggaaggagcaggatgtgtcgttgggagcgaacaagttccccgagagacagccgattgggacggcggcgcagagccaagacgacggcaaggactaccaggagccggcggcggcgccgctggttgacccgacggagtttacgtcatggtcggtttacagagcagggatagcagagtttgtggccacttttctcgttctctacatcaccggcttaaccgttatgggag

SEQ ID NO: 26577 - DNA, 256 bp, Glycine max
  Clone ID: 701097433H1
tgccacaatccctctctctctccgacgtacatttccatctttttagggtttcatttcatggactccgattcctggatttccacgcgcctctcttcctcttcaaggcgccaccattatcgatctgatctgtaagccgaagagaattaaaggaacgatgaattcaaggccgaatttccaaggcccttctgcggcgaaggataagaaggcggttccctccggtggcaaaattgaggacaacaacctaatcaaagcaaaa

SEQ ID NO: 26578 - DNA, 245 bp, Glycine max
  Clone ID: 701097434H1
cattaatttacatccttaaacaaaccttcccctacttctctcaaattctcctctctcttcataaacccttctcattattttcagcttaatttcctcactagtcattaatgggaaaccaacaccttgcagcgatggtggtgctaatggttccggttctgacattaacaactgctaaggccttggatgatgaaaattactatttcagccttgcaggcaatgaggcttctttggacctcggggtttcc

SEQ ID NO: 26579 - DNA, 255 bp, Glycine max
  Clone ID: 701097435H1
agctagcaagggtgttgtagtatagttagagatatcactactacaccaccctgcatagtttgttcagctataatactacttgagcttctttaactacttttccaacctaaattggacaccaaatgggaacctcctgggccaggtaaccaattggcatgcctccttttaaggccaccaatggaaccaaggagtgaattggcagggaaggacttgggcctggacctggttgggttgggggttgaccttgacctgggt

SEQ ID NO: 26580 - DNA, 74 bp, Glycine max
  Clone ID: 701097410H1
ggagtgttgtagtgtgaagaagaggaagaatgagtcaaccgacacagcagcgcctctatgatttcggcacaatg

SEQ ID NO: 26581 - DNA, 184 bp, Glycine max
  Clone ID: 701097377H1
tctcgagccgattcggctcgagtgttgagcaggctatccgaaacaagcagttgttcatcttagatcaccatgactatctcattcctcatttgaggaaaataaatgcaaataccacatagacttatgctaccagaaccatattcttcttgaaagatgatcggaactttgcacaccattgagccat

SEQ ID NO: 26582 - DNA, 103 bp, Glycine max
  Clone ID: 701097379H1
cgaagagaatggctccaagggtttaatcgtttagcttgtaagcttctcagcatgcacgagtcgtgtcttcggagatatgacttgtatgaatctaagaatcatg

SEQ ID NO: 26583 - DNA, 275 bp, Glycine max
  Clone ID: 701097380H1
ctcgagccgctttcttctcggtccagtgtctctttcaaagtgctgctcgtgccagcattgaccttagctagagcagtaaccgtcatcaccactgccagtacggtaccatggctgtgcttcaatctttcgtttcggtccacccagattctcacttccccatacagaacctcccctacggagtgttcaagccccaatccgcttctcctcctcgtcccggcgtacgcatcggagacttcgtcctcgatctctccgaaatctcttccgctggtctctcg

SEQ ID NO: 26584 - DNA, 125 bp, Glycine max
  Clone ID: 701097381H1
gggttgtaacatatactgtgtggcaagactgtgaaggctcgacgaagaagagtatcctgtgtaaactcgagtgattactgtaataaattaatcctactggaaacaaagaatggatagaatcatat

SEQ ID NO: 26585 - DNA, 272 bp, Glycine max
  Clone ID: 701097382H1
acgtaagaattcaattcggctctagctatagagcattgtgaaggtaaaatcttacattatatcagaggcaggtgttcttgcagacaagataagtcctggagtgctcaaatcacttgtatccttaaacgacaagccaaagtaagatgctttgagctgactatttagtgagaaaccttgtggtggcagtatcaactgggtggaaaattgcaagtgatgtctggaagtctttcatgaggcatttaggctgaggtgtatcaattctgttgctgtga

SEQ ID NO: 26586 - DNA, 262 bp, Glycine max
  Clone ID: 701097383H1
gatgagacaggctctcgctaaagatcaaccttggaagttgaaagaatcacgtgtgctggagatattgcaagcgatagacagcaacacagatgggctagtggatttcaccgagtttgtggcagctacattacatgtacatcaattggaggaacatgattctgacaagtggcagcagcggtcacaggctgcttttgagaaatttgacttggataaggatggctttattactccagatgaacttagaatgcatacgggtttagag

SEQ ID NO: 26587 - DNA, 262 bp, Glycine max
  Clone ID: 701097384H1
gccgattgcctgagtatccttcagaacaaatttaacagagatacgcgaacttttgctccagactcagagatattgcaggctttacaacagagttctgtaggtcaatcttctaattataaacaaatccaaaagcgttgtatgcctttcttgaggtttaagaaagaggaagcaattgcacttgggcctcaagccctggatttgagattgccgtttggtgaaattgaggttcttaaggaaaacttggacttgatcaagagcagat

SEQ ID NO: 26588 - DNA, 262 bp, Glycine max
  unsure at all n locations
  Clone ID: 701097385H1
gggctaaggaaaaagctagagagatactcaaattgcatgctcgggcgtggaggaattctccatgcataccgaacaatttgcttaattcatacccgaattatgtgtgaaacaaaacgagaattttgaatggtgcctcttttagaaattttaatgtacagaattatttggacaggatacagttaggtgtaagttataaatatgaggtgcaactaagcattgattgccccacanaacaagtataggtgggtagtgagattaggtt

SEQ ID NO: 26589 - DNA, 171 bp, Glycine max
  Clone ID: 701097386H1
gtgcaaccttgtgctgagagactaatccattctcatgcactgccactatattctattgttggctctcactgcaccactcgttcattaccttaatgtactcagagagagaggatacatgatatagcttcaccatgtatattctgatgatcaatggcaccatgacgattccat

SEQ ID NO: 26590 - DNA, 235 bp, Glycine max
  Clone ID: 701097387H1
ctagttgggtgttcgaagacgaggtggacgatgatctggtttcggagttcaaagatctacccatgaagttccaacaaacactgatgccagacctggaacgaatctccacaacctcaaaagcctccataacaaaagccaccatagagatcacgagagggtttcaaccctacgttggcaccaagtacgcacccaccagaaccactttactctcttgcgcattcgctttgatcctttg

SEQ ID NO: 26591 - DNA, 145 bp, Glycine max
  Clone ID: 701097388H1
ggagtctcttattttcctttgtaatggaaagttagaaaccctcatcgtcaaagcacgcgttttttttaatctctctctctcaacaaatatttgtgggtagattcaattcaccatgtacgagctcatacggagtaactctgaaatt

SEQ ID NO: 26592 - DNA, 258 bp, Glycine max
  Clone ID: 701097389H1
ctctaatccagctctgcatacacaagtaatgggcaaaattcgaagtgcatgccatgagtggggatttttccaggtgattaatcatggaattccaatcagtgtcttggatgagatgattggtggaattcgtagatttcatgaacaagatgctgaggtaaggaaagagttctatactcgagatttgaagaaaaaagttttgtattactccaacattagcttgtacagtgaccaacctgttaattggagagatacattggt

SEQ ID NO: 26593 - DNA, 258 bp, Glycine max
  Clone ID: 701097390H1
aaagataagaccatcaaagtatcacttcagccttatccggattagggtttcggtttttgacccaacctttgacgtatcgaaaccttaagtttcggatcaggtctgagcaatctggttggtagaacctttggtcttagagagtcaagttttatgtctgaattagacgatcacattcctactgccttcgatcctttaactgatgcaaatgctgatgactcgggtgctgggtcaaaggagtatgtgcatattcgcgtcagc

SEQ ID NO: 26594 - DNA, 259 bp, Glycine max
  Clone ID: 701097392H1
aacaaattaagcgtgaagaagccttctgttatctcaggatacaacaaacaagcatgtctgccctgaattccactcatttcacttcattgagggaccaagtgctgaatgtattcaaggaattgcaggagatcctcattaaattcttaacactgtccattgctttgatttcactaacaaacactgagtcagggaagcttttgtctacagaacagcacaagctaatgatgattctgattttaaccattgtcttatacttctt

SEQ ID NO: 26595 - DNA, 265 bp, Glycine max
  Clone ID: 701097393H1
attgattcagctttacataatcatagacaatcttgcagcacaaatctttcatccaaatccaaggagcagtctcttcctaattcagatattgtgcatgttctggagggagcagaggagatagttgaagttgagttgaggaaagaggggaaagttgaacttggagtgtataagagttatgctgtcttcactggttggtttatgacagtcattatatgcctatcagccattctgatgcaagcttctcgtaatgggaatgatttatgct

SEQ ID NO: 26596 - DNA, 271 bp, Glycine max
  Clone ID: 701097394H1
ctctcgtcttctacaagattttctgttcgatctccaccaaggttgttccttccacctccgccatgagtctcatctttggaaagcgataaacccccgcagagcatcttcgggatcataagaggatgctggacaaatcaatcagagaaattcagcgtgagcgtcaaggattgcaaacaccagacaagaaattgattgcgaggatacagaaaagtgccaaacagggccagatgggagctgttagagttatggcaacagatcttgttcagacaag

SEQ ID NO: 26597 - DNA, 261 bp, Glycine max
  Clone ID: 701097395H1
attaccagttactatactctctctttctgaaacaatttgcccaattgtttgagatgttcaatatgagatttgtatctcaagatttgggtggtttcatgtgcactaatacttctggtgtcatgcacaacatactcatcagcttcttcggggaaacctgagaacaacataacaacatctgtttataaatcacccaagattgagctaggtccagggttagtttcacacaaattatattttgatgttgactttcaagaggccata

SEQ ID NO: 26598 - DNA, 280 bp, Glycine max
  Clone ID: 701097396H1
aatttctcccacgacaacgtatcacaagctcccaatatagcaagcagcaaacatgatttcttccgtgtcctttccagcgtctcttcccgccgttaacttctccggcaacgccatggcttcgccgtcgtgccgcgtcaaatcccggccaatagtcgccttcgccaccgtcactgccaccggtgaagctcgctcttcctggacggagcaaccgagaacttcctatctgaattcctcttgctcttcgctttacgatatcctcggcatccccgtgggcgtctaa

SEQ ID NO: 26599 - DNA, 139 bp, Glycine max
  Clone ID: 701097401H1
gttcactcttcttctcttgcggctagggttttagcgcacttcttctagatttaaggaagatgggtaaggaaaaggttcacatcagtattgtggtcattggccatgtcgactctgggaaattcactaccatggtcactga

SEQ ID NO: 26600 - DNA, 146 bp, Glycine max
  Clone ID: 701097402H1
gaaggaatcacacaagagaaattttgaggtggatcttggtaatttaaatttggtccaaaaatagtaaaaaaaaaaaaccatagttccattaattttcatgtccttgctaacggtggggccaccaaggggggcaagggaattttttc

SEQ ID NO: 26601 - DNA, 237 bp, Glycine max
  Clone ID: 701097403H1
ctcgagccgaaagaattgaaaattgagaacgaacctggttctggaaagaattgaaaagtgagacgaagagattgagcatgccggcgtgaaccatgaccggctcctccccttcctttgttcggcgggacggaaaccgagggacaacggcggttgttttcaacgggattcaaacttctccaattggggccgaattggcgggccatttggacgccgaagaaggcgcgttaaacgccgggg

SEQ ID NO: 26602 - DNA, 263 bp, Glycine max
  Clone ID: 701097404H1
cgagtccgttgagtttgattttgtggatgaaagcatagggatagggcttttgcaaacctctccaatgtttctcgaaattatatgaccatgcggcgaattcggatgctggaatccttcttcggcgtggttcttccaatgggtccaaggtttcctaaggaattccttttcaattcggtaataaattagatcgatctccttcggtagtaaatcctggccccttttccattaattatttgaaccggggcttctaattcccttttttg

SEQ ID NO: 26603 - DNA, 252 bp, Glycine max
  Clone ID: 701097405H1
gtccactttgaaggagcttgatggtactaatcctggacagaatccatatgtcctttgtcgtttgtttaagaaacatgatgagagccttgaagtttcacactgtgatgaagcagagccgactggttccactcctgtggcttaatccacagagggaataccatctgatcttgctggtggtgcaggattccccttaaaagttaacggagatggttaacaacaaggaatgattccttgaaaatccgagggaggcat

SEQ ID NO: 26604 - DNA, 248 bp, Glycine max
  Clone ID: 701097406H1
aaaattgttctcaccgtgtgtgtgttgtgtgtgtgtgtgagagagagagagagagagagagagagagagagagagagagaggttacgctatggctgatgagagcggcgttgagtccccagtggagagggagagagattatgatggagaaaatgatgtccctggttccaagggatgtggagggtgcaaaaaaccttttaaaaacgggttaatcactggggattccgggggggtcctcgaaaataagtcc

SEQ ID NO: 26605 - DNA, 230 bp, Glycine max
  Clone ID: 701097407H1
gttactttccaatttgaattgatccattttcatttctttcgcaaaagttgcaactacttcctcagaaaaaaagtttctaagttaaagaaatccagagagacaataatcccaggaaacggtttaggtaaatgcaaagaaattcttcttggtgataattgtccaccttattgaagtttttttaaattatgattacaagttgaattacggaattttttagggattaaccattt

SEQ ID NO: 26606 - DNA, 253 bp, Glycine max
  Clone ID: 701097408H1
ctaaattagagacgacccactttccttgcagatctttttccagggaaaagtttggattttttgatcgttttgtgataagagttagatgttgagtgatagacgggaaagttgaagttggggtggattatatggataagccttgttgcctcaagtccttcaatcaagtgggttgaaggcggtcctccaggaactcctggcaaaggcaggaccatcaattcctcatccaataatggcaaaagctaagtaaaaggga

SEQ ID NO: 26607 - DNA, 213 bp, Glycine max
  Clone ID: 701097375H1
cttatctctctctctctctatctctgccgaatcactgttcgctcgacccttccacttcgtattccctgtttccggtattcgcgtcctatctggctgcacagctggcatccacttacgatgctctgtcccgtaccagatctggatcaactgtgacaaggttgggtgcagtaatgttgtatcaatctgccttctgaccggtacgcgtggggatac

SEQ ID NO: 26608 - DNA, 258 bp, Glycine max
  Clone ID: 701097409H1
ggaaggaaaaatggagttgttcttctacgcggtgttcggcggtttgggagcggttgttgcagtgacggagctgagcaagagcaacaaggaccgaatcaacacctcttccggattcaattccttcaagaacaactaactcatcggctaatccctcatgatgggtggaaaattggtaacagggccaaaaggccaataactttaccagtccttatggttttgggaggggggccttaggccactcctccatgccgggtttgg

SEQ ID NO: 26609 - DNA, 269 bp, Glycine max
  Clone ID: 701097348H1
gccaagtgaaagtgagaaaaaataaaaatcaaagagcataatgtcagggatcattcacaagattggggagacccttcatgtgggagggcacaagaaggaggaggagcataagggtgagcaccatgctggaggatacaaaggggagcaccatggtgaacacagtagtgagtacaaaggagagcatcatggtgaacacaaagctggagagtaccatggtgagcacaagacagagcacaaagaggggttcctagacaaagtcaaggacaaga

SEQ ID NO: 26610 - DNA, 273 bp, Glycine max
  Clone ID: 701097349H1
gagcctgcacttgttccacccttcaagataccactcctcctcttccccaattctcttatgcgtaatctggcactcttcatagaagactttgtaagatccaaagagaaatggccttagaccagtattttgatgaggctgtgccccagttggattccttggaagataaatcgtctctcgaaacatggaaatgtggcagtgacgatattgcagattcggatagaaatgcctctggtggctttgattgcaacatatgcctggagtgtgtgcagatcc

SEQ ID NO: 26611 - DNA, 191 bp, Glycine max
  Clone ID: 701097350H1
tctggttatatctgagtctcgatctgatgcacttgttcatatagctgcattggcaattcgaagtgagaatggtttactgctctaaaggtggaacataatcccgacgatcatatgcagtcttactcaaggtcattacttcagtgatgccagatactctcggtgacagactgattgggcttgtgatttcaaga

SEQ ID NO: 26612 - DNA, 266 bp, Glycine max
  Clone ID: 701097351H1
gggattgacaaccctatgatcaatccaatggttactggggcgcctagcttggctggacttgggtgttctaagattctggattgcgttgctgaaaaggatctgataaaggatagaggggttgcgtactatgaggctgtgaagaagagtggctggcaatgtgaagcggaactgttcgaagtggagggcgaggatcatgctttccacatccacaatccacaaacccagaatgccatgaaaatgatcaaacgcctctcggatttttcctc

SEQ ID NO: 26613 - DNA, 258 bp, Glycine max
  Clone ID: 701097352H1
ctcgagccggttttccttttaaatgtttctttaaatttctcaattgatcagagatcttcagcaaaccggtcaagtttgtgcagtttggccagatgggaggtgggtttagcgtgctacacttagttagaccttttctctcgttcctacctgaagtgcagactgctgataggaaagtgtcatttagagagtaggtcatatatactgtgatctctctgttcagtatcctgtttgcagtcacttcctctgtatgtatacata

SEQ ID NO: 26614 - DNA, 206 bp, Glycine max
  Clone ID: 701097353H1
ccgatccaattcacctttctcctctctcttctcaattccccatctgggtatacctgtttccctcaaagttctcttcttcgtcgtgcttcagaagtgctcagtgatacccttttcttagttcaatgagagcggggtaagggagtcacgaagaggatgagtacgaggaagcagagtttggttcttccaagacacagggcacttcctct

SEQ ID NO: 26615 - DNA, 260 bp, Glycine max
  Clone ID: 701097354H1
gagcatggaaagtgaccagaaagtccaaatagcttcttggagtgaggtcatgtcaggtgctggggtggagtttcatcaaggggctcctaatttgggacaaggtggtggtggtggccttcagagacaacctagtatgaccaagaacaattgtctttgttctccaaccagacattctggttcgtttcgttgccggcttcaccgctcccctagcctccagaggaccagaagcatggaatcagagtccctcagggatcacgcat

SEQ ID NO: 26616 - DNA, 265 bp, Glycine max
  Clone ID: 701097355H1
gcttgttgtggtacatttatagtgactgaatagcactggcttgtctttgcagggaaaagttagcgtgtctttaggtcacaggattttgagagatttactttttaatctgcctctgaatcaattctgcaagaagatatataatgtttggttcaaagaaatctcctttgaacgttgctaaacctagctccgttgagtcttggacgaatccatttgattctaatgatgagggaatggataccaaaaagtatagttcctctagaaaact

SEQ ID NO: 26617 - DNA, 96 bp, Glycine max
  Clone ID: 701097356H1
cactactgaagtcggggttacaagaatgacctcctccaacatatgtatagtagtcacgatatccatcatcatatgcacgtcattcgcctatagtat

SEQ ID NO: 26618 - DNA, 262 bp, Glycine max
  unsure at all n locations
  Clone ID: 701097357H1
agcttgtctcggacattttggatatcagtgagttttcgcacggtcctttgaggttgaaggagtctgaattctgttctgaggagtttgaacactttgttccttgttacaatatttctgaggatgtggaattgggagtttctgataacaatgaagtggaccggcaatgcagccacgagcttaggcagaatctgttggttctgncaccggtgacttacaaaattctcttaaggtggcctactggaaaagcagtgatctgggtgct

SEQ ID NO: 26619 - DNA, 265 bp, Glycine max
  Clone ID: 701097358H1
ctctttcctatcacactttctagatagctagccaaccagagtaagctctaaagatatttcttatatatcctatggtccgagagtgcccttgttctgcgccaaccctttcttccacatcttgcgtttcaacctcttcctctcttgagtccccttatcatcaaatacccttcttcttcaacctccaccaaattcaacccccacataacaaatctcctcccatcccatttttcagcaccaaagtttgaaacttttctcaattggttgt

SEQ ID NO: 26620 - DNA, 263 bp, Glycine max
  Clone ID: 701097359H1
cctcgagccgattcggctcgagatcactttccatgatgctcaaggacccaaggctgatagactctcgataacaagagagcctacttccgctcaagaataaggcaacaacatgaccaacacttgtctgggccattgcgtataagtgtaaggcgggcttacattttggaggactcttataatcagctaaggatgcgtcctactcaggatctgaaggggcgattacatgtgcaatttcaaggtgaagagggtattgatgctggtgt

SEQ ID NO: 26621 - DNA, 254 bp, Glycine max
  Clone ID: 701097360H1
tcctcgagccgaatcggctcgaggggctcgagactagttctagatcacgatctagaacttagatctagtgatggcaggaagtttgagtaactgcatttaggagactacgaatgggaaacctatggagaggtatttgctccgtgtgtccaatcttgcatctggtcttcttaaattgggccataatggagatagccgtgttgccattttctctgataccagggctgagtggctcattgcccttcagggttgcttca

SEQ ID NO: 26622 - DNA, 268 bp, Glycine max
  Clone ID: 701097361H1
tcattagctcttatttgacggcaatgctcttaatctataaaagatatatggtgtctaaatgttcagcatgaatatatagctaggcaaagaagagcaaaagaaaatcacattacctgtctctgaaatcagattcactttgttcttcatcaatggaaagagaacaactatcccttcacatgaatggtggcaagggacaaaggagttatgcaaacaactcctcactacaaagaacaataatacgtaaaaccagatcatacttgaagactat

SEQ ID NO: 26623 - DNA, 228 bp, Glycine max
  Clone ID: 701097362H1
actaggattcccaaggttcaacagttgttgtaggacttcttcaagggtaaggcgctttgctagagcattaagccacatgtagctgttgcctatggtgcagcagtgcaggctgccagtctcagtggcgagggtaatgagacagtccaggatcttctgttgttggatgttacgcctctctccccttgagttggagaccgcgggatgagtcatgactgtgtcgattcccag

SEQ ID NO: 26624 - DNA, 265 bp, Glycine max
  Clone ID: 701097363H1
atacaaaccacgttcttctctgcggtgccactgcgacactcgctggccccaaaatgaccatcattaacatgaaccccccggtaattacaattctgccctcactctaattcacaaatacctagcaccaccctcactccttttttttttcccttcttccgaaccttttgctttttcggggtttgcatgttgacggttacttggcggtattatgggacatcaataccagcagggaattctctccggttggtcaaagagccctagatct

SEQ ID NO: 26625 - DNA, 284 bp, Glycine max
  Clone ID: 701097364H1
gcttcattaacatgggtgctggtgactactacaaaatactgaaggtgaagcatgatgccactgatgaagaagtgaagaaggcttataagaaattggcaatgaaatggcacccagataagaaccttgaagaccctcttaggaaagaagagtttgaggccaagtttaaacaagtttctgaggcctatgatgtgcttagtgacccaaagaagcgccagatctatgacttgtacggtcactatccccttaactctcaacgcttcaccaaggaatatggctatggaaca

SEQ ID NO: 26626 - DNA, 118 bp, Glycine max
  Clone ID: 701097365H1
ccgacgtcttcgacgagtcgaagctctcccggctccccggcacctcggccattggccacgtccgctcctccatcgtcgagtaatccatgctcaaaaacgttccaccccttgctggccc

SEQ ID NO: 26627 - DNA, 137 bp, Glycine max
  Clone ID: 701097366H1
ttagaacatcgagtctcatgacttccttaagctccgtagtgctggtccttgtagctctaattctattacctcatgttcttgctgactatgagaacgtcccggtgtaccagattcccattgagaatctagcactttac

SEQ ID NO: 26628 - DNA, 260 bp, Glycine max
  Clone ID: 701097367H1
tgacggtctattcaagacacacaaggtaaactatgtcaaaggttatggcaaatttgtgtcaccatctgaagtctctgtggacaccactgaaggtggaaatactgttgtgaaaggctagcatattataattgccactggctcggatgcgaaatccattgcctggcgtcactattgatgaaaagaaagtcgtatcatcaacgggggctcttgctttgactgaaatctccaagagactcgtagtcattggggcaggctacatt

SEQ ID NO: 26629 - DNA, 259 bp, Glycine max
  Clone ID: 701097369H1
tggtagccactgcatttctgcttgttttctctgaacatggtagtcacaaacacaaaccagttacgggataccattgattccacttatgataggaaagctggatagagagcctttgatgagtcagaatctggtgcgagaggtcctgtagagtccgtagtgacgaagcatcctcgcaagtgtcatgctggcaacctggatgtacctgaaagttcacgtagtcacaccaattggagtatgcccatcattggcctcagggtct

SEQ ID NO: 26630 - DNA, 261 bp, Glycine max
  Clone ID: 701097370H1
cggctcgagggagacacagactctatagctaatccttcccgactctctaagacaccaaaaagatgaagcaaatcgacgacggcgatgacgagcagcgatccctctcgcctctggtggaacaggtcctggagaacgtcctggacagcgtgctcgagttcctcaccgcccgtcgcgaccgcaacgccgcctcactggtctgtacatcctagtaccgcgccgaggcgctcacccgccccgacctctccatcggcaactgctagc

SEQ ID NO: 26631 - DNA, 265 bp, Glycine max
  Clone ID: 701097371H1
cgaagggacgtgtctgactccgatggcttcctcataatgtgaccgtacgtaggagttccgattactatcggagactatgaagaagatcggaggtccggttcaacccgaaaatcctccttcgacctctcgcggcggcgagtcgtcgtattcgagatccgaattcaaccgaaaggcctcgcgaatcgggttggggatccacgagacctcgcagaagatcgcgaggctcgcgcagctggcgaggaaatcgtccatgttcaacgtcccg

SEQ ID NO: 26632 - DNA, 259 bp, Glycine max
  Clone ID: 701097372H1
catcgagccgaatcggctcgagcagctgtgcaaatagagtggtctttgtggactcgtgacattgcagaagagatagtccctctctgcagggaacttggtattggaattgtaccatatagtcctcttggtcgtggcttttttggcggcaaaggagttgtggaaaatgtgcctacaaatagctccctgacagcacatccacgctttcaagccgagaacttagacaagaacaagaatatatatgaacgaattgaaggccttg

SEQ ID NO: 26633 - DNA, 177 bp, Glycine max
  Clone ID: 701097373H1
ttcacgatgaaataaatgggcatatcattcaaagattagtcggtgatgatgttaattttgggcatgatgttgctagggataaggtgaaagtagtaaatgcaatattgtcataattgtactggtgctatcacatcaatgtagtgtgggaaataacgttgcttaattattgagatgaac

SEQ ID NO: 26634 - DNA, 217 bp, Glycine max
  Clone ID: 701097374H1
catgtgtttgacttgactcgtccatcttcgtcgttatcgtctgcttttgttgtttgtgtgattgttctttctctcatctgaaaatgtcttgctgcggttgtaaatgtggttgcggaagcgcctgcaagtgcggcaactgctgccgatgctgctagatgtatccagacttgagcgactccgagtcaaccaccagtgagaccttgggcatgggagtggc

SEQ ID NO: 26635 - DNA, 270 bp, Glycine max
  Clone ID: 701097347H1
ctttgatgaatacaggctcttcattagattgagaggaccatgcggcaaatctcatgtggaatcgttaaaatctccaagatgatcgatatatcgttatcaacaaggacattgcttgcaatattatataattactagtattgtaaatcctgttcctagatatgtacttgtctgaacaaattgcctaatagttaaaccacaaaagcaattggataatatagatatgaaattgatgtggaccaactgtttatgttaatggatgaatttgggagt

SEQ ID NO: 26636 - DNA, 269 bp, Glycine max
  Clone ID: 701097322H1
ctctgctcgtgcctctagggttatcatatctccatttccatttcctctctctcagtttccaagaatcttaagctatgggaaagtcttacccaaccgtgagcgctgattaccagaaggccgttgagaaggcgcagaagaagctcagaggcttcatcgctgagaagagatgcgctcctctaatgctccgtttggcatggcactctgctggaacttacgacgtgagctccgaagaccggtggtcccttcggaaccataaagcagccctcgaa

SEQ ID NO: 26637 - DNA, 264 bp, Glycine max
  Clone ID: 701097323H1
gggaaagatgcagatattcgtgaaaaccctaaccgggaagaccatcacccttgaggtggagtcaagcgacaccattgacaatgtcaaagccaagattcaggacaaagaagggattcctccggatcagcagaggttgatcttcgccggtaaacagctggaagatggccgtaccctcgctgattataacatccaaaaagagtcaacattgcatcttgttttaaggcttcgtggtggtattattgagccatctttgatggcactggc

SEQ ID NO: 26638 - DNA, 269 bp, Glycine max
  Clone ID: 701097324H1
cggctcgaggacagaacaaagggtgcgaacaggaataagcgaaaaagggcatcacaagttggaattacaccaagaagtggggttacaagagcgaagaacaaaaacatttgtgttgtattggagttatttatatttatacgctcgtaactcgcacatagtatccctcagtcattccgtgtccatagttgcaagttatctaagcccagtttgtgtttcactcacacaccgtttccagtaacaacaaaacatcatgctttctcgcccccaca

SEQ ID NO: 26639 - DNA, 266 bp, Glycine max
  Clone ID: 701097326H1
acctgacctcacaaggattgagtgttggatctagtcatctagataaaaaaaataaaaatgaagatcattgagaaaattcgcgcacttctgctgatccaaacagggtggtgttctcatttgagttcttcccccccaagactgaggatggtgtggacaatctgtatgagaggatggaccgcatggtggctcacaacccctctttttgcgacatcacttggggcgctggagggacaacggctgatcttacattggaaattgccacaaga

SEQ ID NO: 26640 - DNA, 261 bp, Glycine max
  Clone ID: 701097327H1
cagaaaatggggtctctaatggcctctcttactctcactcttgtattggcaatagtttctctaagcttgtcatctcaagcctcagctgacaagtacgactattcatctccaccaccaccagtttacaagtacaagtccccaccaccaccctacaagtattcatctcctccaccacctcctaagaagccttactaatacccatcaccaccaccaccagtgtacaaatacgagtcaccaccaccatctcaccagtacccttct

SEQ ID NO: 26641 - DNA, 266 bp, Glycine max
  Clone ID: 701097328H1
ctctgcattgatggttggattggcgatcgtgtgctcgcacggcgcgttccgcgttcccgaggatctgtttctcgacgatcaggagccgaacagctccggattcctctcgttcctcggtggcgccgccgcttcagccgccgcgccggccgtcgcgcgcgtgtaaacggcgggatctggacgaacgctgtgtccggtggattcttctcaggttggttcggccttttttgttgtaatatgctacattgaaaattgttgcgatattcttg

SEQ ID NO: 26642 - DNA, 269 bp, Glycine max
  Clone ID: 701097329H1
cggcaagggccaggacatggtcttcaccgtctacggcgagcactggcgcaaaatgcgccgcatcatgaccgtccccttcttcaccaacaaggtggtgcaacaataccgccatggctgggaatccgaggccgccgccgtcgtggaggacgtcaagaacaaccccgacgccgccgtctccggcaccgtcatccgccgccgcctccagctcatgatgtacaacaacatgtaccgcatcatgttcgaccggagttcgagagcgaggaggacga

SEQ ID NO: 26643 - DNA, 274 bp, Glycine max
  Clone ID: 701097330H1
atcagctccttctccgtcaaaagacgcataacctcaaccgtcttgaggctcagagaaacgagctcaattccagggtgaggatgctgcgcgaagaattacagcttttgcaggaaccaggctcttatgttggtgaagttgtcaaagtcatgggcaagaacaaagtccttgtcaaggtccacccagaaggaaaatatgtcgttgatattgaccatagtattgacattacaaagattactccatccactagagttgcacttcgcaacgacagtatgtt

SEQ ID NO: 26644 - DNA, 277 bp, Glycine max
  Clone ID: 701097331H1
ccctcgagccggctcgagcggctcgagctaatcataatcacttccaactgctctcactagtcactactactactggagatggcttcacctgcctcttgcacttctatttccccttctagtgatggttgcctttgctggtgacttaaacaaagactttgacatcacttggggagatggccgcgccaagatactaaacaatggagagttactcactctttcattggacaaagcatctggttcaggttttcaatcaaagaatgagtatctctttggaaga

SEQ ID NO: 26645 - DNA, 233 bp, Glycine max
  Clone ID: 701097332H1
tttctctctcctcgactcgatcccaattccactagggattcaattccgatgcgattccgagcttgttagatccacgacaaggtttcgtttcccagattcttttgtaaaaaaaaattcttcctctgcccaacaggtaagttgtaaaaaaatggaccatgacaagactgggtgccaagctcctcctgaaggtcctatattgtgcatcaacaactgtgggttttttggaagtgcag

SEQ ID NO: 26646 - DNA, 271 bp, Glycine max
  Clone ID: 701097333H1
gaaaacaacgtgacaccaaaggacctgacagctatggatttgttctctccacaagcttcctcctatcgtccttcagaggagattccaaccttgattaattccagtgcaattaaatctgtgagcaagagtgctataactgcacagatgacaatcttttatggtggacaagttgttgtctttgatgattttcctgctgacaaagcaagtgagatcatgtcctatgccaccaaagggatcccccaaagccagaacaattctgttttcactcaca

SEQ ID NO: 26647 - DNA, 271 bp, Glycine max
  Clone ID: 701097334H1
ctcgagccgcaaaatttgtcatcacggataaagtggttactaaggatgtccaaaagaggtatgagcaagaggtcattgaatttggaggctcttcaatcatgttaaccatattagctacagtggcattgctaaatctttttggtctcctttggggaatgaagaggattatgatggatttggaattcagctctagccaattgatgatgcagattacactgagttcattggtggtaatgatcagtttaccagtgtatgaggcacttttcttcgt

SEQ ID NO: 26648 - DNA, 266 bp, Glycine max
  Clone ID: 701097335H1
cgactgtttattaaaaacacaggactctgctaagtggtaacacgatgtatagagtctgacacctgcccggtgctggaaggtcggaaggagaagtgttataagctttgaatggaagccccggtaaacggcggcagtaactctaactgtcctaaggtagcgaaattccttgtcgcataagtagcgacctgcacgaatggtgtaacgactgccccgctgtctccgacatggacccggtgaaattgaattctccgtgaagatgcggatac

SEQ ID NO: 26649 - DNA, 261 bp, Glycine max
  Clone ID: 701097336H1
atgaccacccctcgcatgacgtggcggccgggcagatgttcgtgaaggaggtgtacgaggttttgaggaagagtccgcagtgggaggagatggcggtgctgattacttacgatgagcatggtgggtttgatgatcatgtggcgacgccggtagaaggggtgcctaaccccgatgggatcgttgggccccacccttattactttcggtttgataggttgagggtgagggtgcccacgtttattatctcgccttggatcgaca

SEQ ID NO: 26650 - DNA, 260 bp, Glycine max
  Clone ID: 701097337H1
ccctctttacccacaccctctctctctctctctctgtcacgcacagagaaaaactcagacacccacgttcacacttcgcacacaccatctctcactgttctttcttcttcctctttttcttttttaaattcttttctcttaatggaatgatggaacacaacatcatcgtcaacaacaacgtgatcgcaccgtttgtcataaaaacctacaatatggtgaacgatccccccaccgataaactcatcacgtggggcccagcg

SEQ ID NO: 26651 - DNA, 256 bp, Glycine max
  Clone ID: 701097338H1
cattattgcgctcaacttttaaatttccccaaagccttggcatcatgggtggcaaaccaggtgcttcaacatacattattggtgctcagaatgaaaaagcattctaccttgatccccatgatgttcagcaggttgttaatatcagtggggatactcaagagcctactagtacttcgtcataccattgcaatattatgaggcacatacccctagattcaattgatccatccttagctattggcatttactgccgaga

SEQ ID NO: 26652 - DNA, 257 bp, Glycine max
  Clone ID: 701097339H1
cttcacttttcttcatagcactcaaaaaacaacaactcatctcatcattattccctttctcactcagcacattctaaacagtagcaccatcaccaataataatggcatcatcctcatcaaccgttgctttgagaaccatctcctctttctctctgaaacctgccaccacaacaagatcattactcaacactagtacttcatccagcatatacctcttactctttacatcagcaaactcattgctctccataaccctc

SEQ ID NO: 26653 - DNA, 265 bp, Glycine max
  Clone ID: 701097341H1
ctcggaaatcgaggatgtcgatgatgaggacgatgaagaggaggaggagttgaagaagaagaagccctttgggttctctcgctccaacaacaaggctgcttctaagcctctctctcgtggagcaacaactgtgaaatctgtggaatcaaaggggcaagctgagaagtgtgccaagagaaagaggaagaaccagtatcgcggaatccgccagcgtccatggggaaagtgggctgctgagattcgcgacccaagacagggggtcgtg

SEQ ID NO: 26654 - DNA, 263 bp, Glycine max
  Clone ID: 701097342H1
ggcgagtttggaaatgttggcgtctaattgccagaatctcgagcggttggctttgtgtggaagtgattcggttggtgatcctgagatatcttgcattgctgcaaagtgtgtggctttgaagaaactgtgtattaagagttgtcccgtttccgatcaagggatggaggcattggggaatgggtgtccgaatttggtgacagtgaaggttaagaagtgtaaaggggttacccctgagggtggtgattggttgaggaggacagagg

SEQ ID NO: 26655 - DNA, 266 bp, Glycine max
  Clone ID: 701097343H1
cctcgagccgctcgagcggctcgaccggctcgaggtttctctctcaccggtcagaaacatgactttggaaacgcaaccaggaacggcgtcgtactggtgctacagctgcacccgtttcgtgcacctctctgtccaaagcaccatcgcctgcccccactgtcaaagcggtttcgtcgaagagatccgtgccggcgccggagccgaagcctcgccacgccatcgactaagtcctttccccgatgatcctcttttgctccggcgcaggg

SEQ ID NO: 26656 - DNA, 256 bp, Glycine max
  Clone ID: 701097344H1
cgtcaagtgtcataaattggtcaagactctcaaatccaagggttattccgtgtcacttgattctgatgcagcaaatattaatgatagggtggattcagaccgcagagcagcggtttctttgattgatctggtgcaaatctctactacggatatagggacgtatgatgtggtagtcctacctagttttgtaccctcaattgacacttacgtgcatattttgacaaagatggctcgcacaagtgtcaatggtgtattg

SEQ ID NO: 26657 - DNA, 108 bp, Glycine max
  Clone ID: 701097345H1
ggattttatcctctcctccataattttccaacaaaatctcaaacataataaataaaaattacatttttattcacaaaaatatcgggattcatcttgttctcattttgc

SEQ ID NO: 26658 - DNA, 271 bp, Glycine max
  unsure at all n locations
  Clone ID: 701097346H1
cactagtcttcctccataagggccgattaccatggcaaggttaccagggtgatagcaaatccttccttgtttgcaaaaagaagatggggacatctcctgagacgctatgctgcttgtgtcctcctccttttaggcattttcttgagattgtagtgaatatgaaatttgatgaagaacctaattattccaagctaatatctttgtttgatggtacgattggcaccaatccagcattgcggccaattaatactgaaggtgcccanaagttggg

SEQ ID NO: 26659 - DNA, 265 bp, Glycine max
  Clone ID: 701097321H1
caaaccctagtggccgattccgtgttggacttggatcgtgccctcttggactctatgcgcgctaaaattcacgatgagctcgccaacctcgacgaaaagattgctgatgctgaggcaaacttaggagagagtgaagttcgtgaggctcacttggcaaaatccttgtgtatcatccggattatggacaaggagaaagccttggaacatctcaaggtaacagaaaccaagacagttgctgttggccagaaaatggacttggtgttta

SEQ ID NO: 26660 - DNA, 264 bp, Glycine max
  Clone ID: 701097294H1
cgcgcgccgcaccccgccgcgctcgaagaaatccgtcgacatcagcgcacgcgcgcgccagctccagacgcggcgcctctggacctacgcgctcaccttcggtggcctcgccggctttgtcgtgatcgttctcacaacttccaagaccagctcgtcttctacgtcaccccaaccgaagccctcgaaaaatacgccaacaatccaacaaaagcgcggtttcggctgggcggtcttgtcctggaaggcagcgtggtgtacccggcg

SEQ ID NO: 26661 - DNA, 274 bp, Glycine max
  Clone ID: 701097295H1
cacttttgctagcattgtccataaacaagctggaccactctctggtcaagatcaaaccatacagcttctctctgaatctaaaccgtctagggaggatggaaacatctttaaccagaaggcctctaacaattcaagccacattagtgatggtggaaggcccagcagtgctagtgtatttgttggtgggtttctcttgggaggattaatagttggcactcttggttgtgtgtatgcacctcaggtagtatttgttactgaaatgtactttttcaag

SEQ ID NO: 26662 - DNA, 280 bp, Glycine max
  Clone ID: 701097296H1
attaatgaatcagttccatttgaatacgtaactagccagatattcccctgtataatcctctaattactaactaccaccaccaccaccactctcccacttcaaaattcatgtctccctcttccctccacgcgctcctcatcattccttcctaggttccgcacacgcgctcaagctccccttccgagtcaacgatgttctccccgttctcccccacggaatctcctggccgctcctcaacaacctccacagcgccgtcgacttgctcccttccttcgtcgcc

SEQ ID NO: 26663 - DNA, 273 bp, Glycine max
  Clone ID: 701097301H1
tgctgcttctggcagaggtggaggccgtgggtttgaccatgactcccagaggaatgataggggtcggagcccagacaagggatctagttggagtgatcgcttcaaaagcgtcaaccgggatcgcagtcgtagtcctaacagggctgcactacctcaactttcccaagtggaagctttcacaaggcaatgatggaacgtggtggtggtggtggtgatcgcaataagagctttaaccgggaccgaagccgcagtcctagccctcatagacagaga

SEQ ID NO: 26664 - DNA, 262 bp, Glycine max
  Clone ID: 701097302H1
caatagcttttgcttctttctgtatatggaaggcacttaaactttctttctatctctctctctgcttcactttctcacttatgcatgttcttgtgaaatcctaattcctcagaaccaaaatcggattcctactgactctgatccctcaaagcttcaaattcaccttgtttggtttgtctgtgtgtttggagtatgatgtcgccgccggcggtggtacacgtgagagaaggggcggagaaacgtgtcgtcgcacgtggcgtcc

SEQ ID NO: 26665 - DNA, 263 bp, Glycine max
  Clone ID: 701097303H1
caacagcacaaagcgggttactgtatgttcaagctaacatctctctctctctatcttagtgcctccttgccagaagttaaaatggcccaagaacactttcctattcacatctgaatcagtgaacgaggggcaccctgacaagctctgtgaccagatctccgatgctgtgctcgatgcatgcttggagcaggaccctgacagcaaggttgcctgtgaaacctgcaccaagaccaacatggtgatcgttttcggagagatcacaa

SEQ ID NO: 26666 - DNA, 268 bp, Glycine max
  Clone ID: 701097304H1
cgaatttcgatactttgatcagatccacaacacttcttcatccatgacgcttggtacttcaggatccagtgtcgtggttccaaggaacttcagattgctggatgagcttgagcagggagaataaggaataggagatggtacagttagttatggaatggatgatggtgatgacatttacatgcgctcttggactggaaccattatcggtccctataatactgtacatgaaggaagacttgatcaattgaagctgttttgtgataagact

SEQ ID NO: 26667 - DNA, 267 bp, Glycine max
  Clone ID: 701097305H1
gggtatgggtctggttggggtgggggaggaaattatgagtccccttaaactaagatatggtttttgtttttaggcatataatagacagcattcaatcttgttgttgtcatattatatatgatttccaaaaataaaattgcagtgtggctttcgtggtcgttctgcttcattcatgcatgcatgggggtgctacactagcctagtgtcactaggtatcatggttatagttgggctgttacatataaatattactgtgtatcatgtaga

SEQ ID NO: 26668 - DNA, 268 bp, Glycine max
  Clone ID: 701097306H1
ctcgcaagcaaaaagaaagaatcccaggcgaggagaaagatggaggggaaggagcaggatgtgtcgttgggagcgaacaagttccccgagagacagccgattgggacggcggcgcagagccaagacgacggcaaggactaccaggagccggcgccggcgccgctggttgacccgacggagtttacgtcatggtcgttttacagagcagggatagcagagtttgtggccacttttctgtttctctacatcaccgtcttaaccgtatggg

SEQ ID NO: 26669 - DNA, 265 bp, Glycine max
  Clone ID: 701097307H1
cgacacaggagtggcggaatctttctgaaaaatcgccgcaaagcgaagcgcaatctcatattaactgcaactgctactacgaactacgaacatcagggtagtcattaagacaaaccctagaaatggggaagaagcagcacagcaaagacagaatgttcatcatccaaacggagtgtgcaacggcgtgaggacgcgctaaatccagagacaatcgcactcccttcaacgtcttccttctattgctgctcgcttacgtttacgccgt

SEQ ID NO: 26670 - DNA, 265 bp, Glycine max
  Clone ID: 701097308H1
gatgacctagccagggcattaaatagcttcagctcacaaaggaaggtgtacttgtctgcagccccacagtgcataatccctgatgctcacttggatagagccatccaaactgggctttttgactatgtgtgggttcaattctacaacaacccttcatgccaatactccagtggaaacaccaacaatttgatcaattcctggaaccaattgatcacagtgccagcttctcaaatcttcatggggcttcctgcatctgaggcagctg

SEQ ID NO: 26671 - DNA, 250 bp, Glycine max
  Clone ID: 701097309H1
cagacactcagtttctgcctcttatttttttttttcctcactttctctctctacttttcctctttatttctagtcttctctgtctatcatagatcttgaactatcctggcaagaactcagagcactaacatcttgcagccacaaaaatgggcttctttctgttaccaaaagcaactccttgcattttgttcttggctctgctgtcttgtacttgctttacttctacagatgcttatgatccaatcgaccc

SEQ ID NO: 26672 - DNA, 229 bp, Glycine max
  Clone ID: 701097310H1
ccgacggtcgcctcgtcgttccacggtcaacgagagtttgactatatcgctttcgcgttgcaatggcccggtacttactcgcaaacgcacccgcagttgctgacccaccaacggttgctgcagaagctccaattttccaacagtgttcaccatacatggactctggcctgactattatgatagaccctggccgtacctgttgctctggatctagtttcgatcctaaaga

SEQ ID NO: 26673 - DNA, 266 bp, Glycine max
  Clone ID: 701097311H1
ctggttatcgaataaactatccctcacactttactccaacttggaattgtttgaattgcagtgaacacttggaagcagatcatgaagcaacgcactccacgccttcaagtcttcaacctccactgtcaagcgagaacactcacctagagacatgacaagagttcagcctcctcttctacctggtcttcctgatgatctcgctgttacttgtttgattcgagtaccccggattcagcacaggaaactacatttagtatgcaagagtg

SEQ ID NO: 26674 - DNA, 248 bp, Glycine max
  Clone ID: 701097312H1
cagaaactttgcctgctcagtcagaatccataaccactcagaaagattccacgaacaaggggatggatatgaaatccatactggagagtaaggatgtagcagccactgatgaatatgaatttgaaagtcccgagtaggaggctcctgccaaagagcctgaaattaatccagcaaagctgaaagcgatgataagagatgaggaaattgtgaaggcgcaagaggccttggagagagagcggacgttagca

SEQ ID NO: 26675 - DNA, 262 bp, Glycine max
  Clone ID: 701097314H1
ccgtgacactcataccacctgctttcatttgagccactttctcagtgccaaaaacactttcacgttttctcatctgaaaatgaggaccatctttggccttcttcttcttgttctgggtttgtttaaatatgcatttgctcaagaaggattttgctctgctccttcggaatcgaaatcaaagcctctttattggcaagtcgacaatgccactctctctcctatccaccttcaagatttgcctggattcacacgcagtgtctat

SEQ ID NO: 26676 - DNA, 265 bp, Glycine max
  Clone ID: 701097315H1
gcgaagcgaaaagcgctttctaacttaagtgatggcgaacgcagctgaagtttcagccttgaaccgcatcaaactgcatcttttgggtgaactctctccactggccactcccctaaactattttgatgaatcaaaccctagcccctctgaatcttccaattcccaatcttcttctgtaactcttaaccactacttcactgacctcttcgaattcgactccaaaccccaaataatcgacctccatactcccaaaacactaacttca

SEQ ID NO: 26677 - DNA, 281 bp, Glycine max
  Clone ID: 701097316H1
cggctcgaggaagttttgtggtagaaggaagattgatatgctgtgggaaaatgtcgttgaaaagcatagtaagggagctaaaggagatgagggatgggattggtagcatgtcaaggcgaggtgtcgagagcaggcgttggaacggtcggacaaagtcacatgttgctcctgatgtcactctaacttcacttgaacctattcagcaagggcattcggcgaatgtgccgcccgaattgcttctggacataataaggagggtggaagaccagtgcgactcctgg

SEQ ID NO: 26678 - DNA, 202 bp, Glycine max
  Clone ID: 701097317H1
cgacgtcttcgacgagtccaagctctcccgcctccccggcacctcggccattggccacgtccgctactccaccgccggccaatccatgctcaaaaacgtccaaacttcctggccgactacgcttcgtccgcgcgtcgctcaacggacttgcactacgtcctcgacgccgaacacaggtcactcacacactcgcacggtgctc

SEQ ID NO: 26679 - DNA, 271 bp, Glycine max
  Clone ID: 701097318H1
ctcttttgttttctcttctttttccttgaagcaaagtgaacttgtggtgtatctttccaattgaagtgaaagagtaaggatgtcaagtgggacaacatactggtgttacacatgcaggcagccaatctggcttgaagggagggaagccatttgcccctactgtgacggaggctttgtgcaagaacttaatgagctgcgaggagttgcgcgccaacacggcttctcatcgcggatggaagatgctcatcaaatgcctgacattatggtgctg

SEQ ID NO: 26680 - DNA, 269 bp, Glycine max
  Clone ID: 701097319H1
ggaaggcactgcttaagggcctcagcccagctgaaaatcggagtattcctccactgaaatatgagtacttttatggcctcttacgtgactttcccgacttatcatttacaatcaatggtggtattgctagtattgatgaggtcaatggagctctaaaggctggggctcatggtgttatggttggacgtgcagcatacaataacccttggcatattctgggacacgttgatactgcaatttatggtgcatcaagtagtggtcttcacgtc

SEQ ID NO: 26681 - DNA, 270 bp, Glycine max
  Clone ID: 701097320H1
cgtgagaagaaacccaacctcgtagctcgatcttcctttaccaatcattaataaggaatggatctgtggctaaaaaaaacaatcaagggctaattgatgtgttcatcagatcacacacaaaatctagcagaaaagaataagaaggttttactcgtacggatattacgagaaggagaattttgtttgagtggatatggcgacgtactttcatggcagcacttcagaaatcccttcctccgctgaagggttgcagacactttacctttgaat

SEQ ID NO: 26682 - DNA, 256 bp, Glycine max
  Clone ID: 701097293H1
tttccattttacacaacacaacccacactcctgtctcttcaatcgtttgagtttgagtttgaatttgatttggacgaggttggaggtttgcaatttccttcggttgtgacctgtgaatccgattgtatctgaattagggtttaagctttacacacagagatgggtagcccctcgaagaagaacgaaagtaaggggtttttcgccgccgtgtcttccatgtttaccagcgctgtcaaccgatcggtcaacgggctta

SEQ ID NO: 26683 - DNA, 271 bp, Glycine max
  Clone ID: 701097265H1
cctctttctaaagttttgcttctttctttcttactttctctcactcaccaaatagttttctcacaaaggaggaagaatggcatctttcatttcactctctttgttgcttctctttctcaattaccccttcctttcccctcaaccaaccctgaagggaacgctctgcatgctttgagaagcaggatttctgatcccaacaatgtgttgcagagttgggacccaacactggttaatccctgtacttggttccatgttacttgtgactccaaca

SEQ ID NO: 26684 - DNA, 267 bp, Glycine max
  Clone ID: 701097266H1
gttgaacaagacacagcagtgcctggcgaagaagagaaagaaaacaatcatgagcttcattctgtttccgattctctttgcatttacctttctgtcctcgcccgttctctctgcttcggatctggtcctcgccaagttgaccgtcgcattgatctgacttcacagattgtgcgcatcactacttcactaaaggtgcagaatacgggatctgatgttgtgtctgagattttgctgtcctttcctgagaaccaggcttgactatcagac

SEQ ID NO: 26685 - DNA, 260 bp, Glycine max
  Clone ID: 701097267H1
gcagaagcctatttggatgaggaagcctgaggagatcacaaaagaggagtattctgctttctacaagagtcttaccaatgactgggaagagcatttggctgtcaagcacttctctgttgagggtcagttgggtttaaggctatactctttgttcccaagagggcaccttttgacctctttgacacaaggaagaagcctaacaacattaagctctatgtccgccgtgtctttattatggacaactgtgaggagttgattcc

SEQ ID NO: 26686 - DNA, 254 bp, Glycine max
  Clone ID: 701097268H1
tgcttctttacttattctatagacagtgctttgtgttgttagtgagttcagtttccatggatcgtacgcttgttatgtcttcacctaatgtctgttcaaacactaatggtggaaatctcatgcgcaggaacattccaccatggccaacaatatatactatccaacttcttgcgtatcaaaagcttcacaatgccataggacaactcaaatagaatgcaatcttttgaggtcacaacagtcaattttgaatcatc

SEQ ID NO: 26687 - DNA, 251 bp, Glycine max
  Clone ID: 701097269H1
cagaaattgttgtccctgactggcgtgggcgtctgtgtatgaatgtgtttgtgagaaaatggaagctgcgatgggactgatgcggaggattcctccgaaacacacagaaacagctctgtcagcgctctgagccttatgcctgacaactcctccgatctcctctctcaagtcgatcagcccctccaggttctgtgcgatgtggaatgcggcaaggagttcattttgtgcgaatacaatagagatgccgactc

SEQ ID NO: 26688 - DNA, 249 bp, Glycine max
  Clone ID: 701097270H1
gtgcaggcatataggaggactgctcatattcgccgtgttggcggcgatgagcaccacctcggaactcttgaatttgctcagatcgtccacggcgctcgggttgtctacgaccacggcggtggagataacgggtctaacagtgacgccttcccggtaatgtcttattacatttatttttaagttcattgtttcgcataataatagtgagtagtgattattgttgcaaaaaaagaggctatagtagtgcga

SEQ ID NO: 26689 - DNA, 248 bp, Glycine max
  Clone ID: 701097271H1
tttgctgtatactacaaaacatcatctttgttccagcgaaacaaagctcttgtaaaggagttaagcacacccccgcctggagctactgatttgtatttccccactaagtattctcaatccacattgggcaatttaaatcctgtttttggaagcaatggctgacatactggaggagtccagattataatcttgtcagatattttttcacattggcttgtgccctcatgatagggacagtattttggaga

SEQ ID NO: 26690 - DNA, 249 bp, Glycine max
  Clone ID: 701097272H1
actttctccgcgtcgtttcgcaaccgactgcatcttggatacgggaacagtgtgccaatatgagctctccggcaggcaagggacctgctatcagaagttaccggcggagaaagacagctttggacctgaccttaaccgtttaccggctggtgagaatcgtgagcaggagggaccttcaactcaggcggtgcctcaagaaattcaacttgaacagcagccacaggttactcaacctccgatgattgacgt

SEQ ID NO: 26691 - DNA, 255 bp, Glycine max
  Clone ID: 701097273H1
cgagggccatagggatgccagtcatagctccagtattggtagagaatcattgagaagcttggatgatgactgggatgatgaaaaggcaagtcccatgactcccatccacatgggggctgctaacagtaatacagcattgaagaggttgaatctgatgacaatgtcgaagcaatggaatctgatgacaatgttcaagcaatggagtctgatgacaaagtccaagcaatggaatccgatgacaatgtccaagcagca

SEQ ID NO: 26692 - DNA, 250 bp, Glycine max
  Clone ID: 701097275H1
tgaagattccgcaacagagagtagaaaagatggcgcggttgatcacagtggtgtggtgcgcggtggcggtgctactgtgcgccgcggcgggcgcgtcgtgggtggaggaggcggcgaacccgatacaatggtggcgggggtggaggcggaggtggttcgggtgatagggcagtgcttgcgcgcgctgaagtttgctaggttcatgagcaggttcgggaagagttaccgaagcgaggaagagatgagggag

SEQ ID NO: 26693 - DNA, 253 bp, Glycine max
  Clone ID: 701097276H1
gagatcctttggctcctatgctatttaatatagtggcagagggccttaccggcatgatgagagaggctgtcaataaaaacctttacagaagtttcttgagtgggaagcaaaatgagcctataaacatttgcaatatgctgacgacacggtcttcgttggagaggcctcttgggataatattcttgtgttgaaatccatgcttagaggatttgaaatggtctcgggtttgagaatcaactatgcaaaaagccaa

SEQ ID NO: 26694 - DNA, 258 bp, Glycine max
  Clone ID: 701097277H1
gtcccaaagagctaacaagagattcaagaccggcatggctaatgaagaggaacagaaaaaccacctcttcggcatcaaagatctcggtcacaagactctccttcagagtgatgcactctatcagtatatattgaaaccagtgtctatccaagagagcacgagtgcttgaaagagatacgcaagatgactgcaaaacacccactgaacatcatggcaacaccagctgacgaaggacaacttctgagcatgcttgttaag

SEQ ID NO: 26695 - DNA, 260 bp, Glycine max
  Clone ID: 701097278H1
gaacagtgttcaacctgtactctcaggagtggctataggagcagggtggcaaagcattgtagcatatgtgaatatggggtgttattatgccataggtattcctgtaggtattgtacttggtaacgttctggtttgcaagtcaagggaatctggattggaatgttgtttggaacgttgattcaaactatagtgctaattgtaatcacctacaaaactaattgggacgagcaggttaccattgctcagaagcgtattagcag

SEQ ID NO: 26696 - DNA, 199 bp, Glycine max
  Clone ID: 701097279H1
gcctcggctagggttcggaaacgaagaagggttctgttttcttttcgcgatgagggccaagtggaagaagaagcgtatgaggaggctgaagaggaagcgccgaaagatgagacagagatccaagtagtgcgttaaaccagtttgtttccgttgcttttacaattgcttatgttgtaaaataggacacccagttgttagt

SEQ ID NO: 26697 - DNA, 279 bp, Glycine max
  Clone ID: 701097280H1
tgagaaggctcagagatgtgtgaaggctgtgaaggagttcatgcgtctgatgggggtgttcacggtggcagatgctattcctttcttgagatggtttgattttggtggctatgagaaggccatgaaggaaactgccaaggatttgatgagatttttggtgagtggttagaggagcacaaacaaaatagggcttttggtgagaacaacgttgatggaattcaagacttcatggacgtcatgctttccttgtttgatggaaaaacaattgatgggatagat

SEQ ID NO: 26698 - DNA, 267 bp, Glycine max
  Clone ID: 701097281H1
ggaagatacagatagggtcaacaacggactagcttatctcaaactccagattcttctctaaatcttcctatccaattatatatagggataaaattattgcaaagtattttttttcctttttcttttgtgatttgcttaatttaaatcattttcagatttaaaccatcgacttttcagatatatctctatatgtgatcagaattctcagatgcagtattatgagagaataaacttgtaccaattgggtagatttgtgacgatgatgag

SEQ ID NO: 26699 - DNA, 266 bp, Glycine max
  Clone ID: 701097282H1
cgagcgaagcacgtgtacttcccttctaattctcaagaacctggtgtggtcttcaatgctgtgggacaagtgacaggactgctttctgaatgcgagtatgtcacagtagaaaagctgactgaaactgaaaaggcattatccctcatcacctattactttccttactctttccttccttctcttctctttaataattagcaatatgattttccaccatcaggctgatgctcaaaactcagttactgctgcattaagacaaggggaga

SEQ ID NO: 26700 - DNA, 252 bp, Glycine max
  Clone ID: 701097285H1
ctagccctcgccctaaaaccaaaatctcgttgcagtgttttcgcctttcctctcacaccaatggccgactctgtaatttcgattcagtacctcaaagatttcgttaattctcaaatctatgacgatagaaatgggccttcaatgcgaaattgctgcgtgctgctggattgttcgcaggatcaatactacttatgcgaaactatggtgaccttatggcaatctgaaagtagaagaactagttgtctgtcatga

SEQ ID NO: 26701 - DNA, 247 bp, Glycine max
  Clone ID: 701097288H1
caaccagcctggtgtgcttatccaggtctttgagggtgaaagagcaaggaccagagataacaatttgttgggcaaatttgagctatctggcattcctcctgcacccaggggtgttcctcagattcagtgtgctttgacattgatgccaatggtatcttgaatgtctctgccgaagataaaaccactggccagaaaaataagatcactatcaccaatgacaagggtagattgtcaaagggagatattg

SEQ ID NO: 26702 - DNA, 246 bp, Glycine max
  Clone ID: 701097289H1
gtgtggtccttgtaaggtgattgcaccacattattgcgagttgtccgtgaaatacccgtctatcatgttcttattagtcgatgtggatgaactagctgacttcagcacttcgtgggacatcaagccacaccaactttcttctttcttaaagatggaaaagaagttgacaaacttgtaggagccaacaagccagagctggagaagaagattgttgtggttaatgatgtagtgcctcataagcaatag

SEQ ID NO: 26703 - DNA, 249 bp, Glycine max
  Clone ID: 701097290H1
gtaaagtattgggttacattgaatgagccctggagttacagccaaaatggctatgcaaatgggcgaatggcacctggtcgttgttctgcttggatgaatctgaattgcactggaggtgattcttaacggagccttatttggttacacatcaccaacttcttgctcatgcaacagctgttcgtgtgtacaagaccaagtatcaggcatctcaaagtggtgtgataggcataaccttggtagctaattggt

SEQ ID NO: 26704 - DNA, 251 bp, Glycine max
  Clone ID: 701097291H1
attcccatgacaggtgtctgtttgccttgttcctgatttaagccataatagccacacagagagagagagagagagaaacaaggcatgagaaaatgaatgatctccatcatcattcccttccccatggatgtgccacccctctctctagggttttcaattccaatttcaatccaacccaacacagagctcccacctttcccattcattcgcacaattcccttcgccctgttccttttcaggcaaaagggtct

SEQ ID NO: 26705 - DNA, 254 bp, Glycine max
  Clone ID: 701097292H1
cggcagcgaggttctccactggggcgacaccaacatgatccgcggcctcgtccctgccatgagaacccttcactcagccctcctagccgagggcataaccgacattaaggtaaccactgctcactcttggcgataatgcggtcatcgataccaccaagtatgggcaggttcaggcccgggtacgcaaagcacgtgttgggcccaatgctgaagtttctgagggagacgagaacacccttgatggtgaacccgta

SEQ ID NO: 26706 - DNA, 283 bp, Glycine max
  Clone ID: 701097264H1
cctcgagccgctcgagccgctcgagcggtcgagtttcttctttcacttctaaaacctcaaaccgcaacactccacaacacaataccagtttcatattcgtaacgtaacttgtctctcccttcttcctctcctctctccgtttcccgattctgccctcacttcacccaattccaattccccacacccccagctaggggaattagggtttcgccgccccattcatcgatgcgccaccaccaccgtcgctagggtttgctgcgatggcggaattggaagaggagcg

SEQ ID NO: 26707 - DNA, 269 bp, Glycine max
  Clone ID: 701097234H1
aaaacatggggtggtttttcctttgaatgtttcacacagtggaagtctcttctcaatttggccattccaagctgtgtttcagtgtgcttggagtggtggtggtatgagatcatgattttgttgtgtggtttgttggtaaccccaaggctactgtggcttcaatggggattttgattcaaaccacttctttgctttacattttcccttcttcattgagcttcagtgtgtcaacaagagttggcaacaagcttggtgcacagaagccctca

SEQ ID NO: 26708 - DNA, 263 bp, Glycine max
  Clone ID: 701097235H1
gcgacgcaccagatcgccgagtcgtggatccacgcgtcgcggaaggttctagagaggatcgcagacgcggtgctctccagaaccttcgagaaggcggctgaggactgctacgccgtggaaaggatctggaagctctcgcggaggtggaggacctccacctgatgatggatccggacgatctcttgagactgaagaatcagctctcggtgaaatcctccggcggcgaaacggcttcgttctgcttcaggtcgaaggagttggtt

SEQ ID NO: 26709 - DNA, 257 bp, Glycine max
  Clone ID: 701097236H1
ctgatacaaagagtagaaaatcatgtctttatgccatcttcccagcagcttctttaatttgtgctgttttatttttcatgacctcgtccttcacacacgagccgaaactaccaggcttgaaaatggatacacagtggacgcagatcagaatgtaatagtggacacagtaattgataaatgcaagaaccagtgcaggcctaatggaagtgaagcattacctgcaggcatagtctccaccacttccagtttggaattgc

SEQ ID NO: 26710 - DNA, 254 bp, Glycine max
  Clone ID: 701097237H1
atcctatcgtagcaaagaaagaaagaaagaaaaccctagcttaccttttcaactttcaagatgcaaatcttcgttaagacactcactggtaagacaatcacccttgaggtggagagttcagataccatagtaatgtaaagtccaagattcaagacaaggaagggatcccaccagaccagcaacgtctcatttttgctggcaagcagcttgaggatggacgtacacttgctgattacaacatccaaaaggagtcc

SEQ ID NO: 26711 - DNA, 253 bp, Glycine max
  Clone ID: 701097238H1
caaaaaactctatttgattccaccgaaaccctaaccccctttcgacgaacgaagggcaatcagttgctcgctccttggatccattcttgaaattctcgttatcgctcttcgaactcaagctctctcgctacgatttctgcttctgcaccaatttctgcggtttctcaagatttagaggttctaagtggttcatttctttgaagcatgccggggttaacgtgcacgcttgcaacaccgaattcaaagatgatac

SEQ ID NO: 26712 - DNA, 252 bp, Glycine max
  Clone ID: 701097239H1
gaaaaacaaaagagtagtggcctttaggtggtgaagaacaagagctcaaatcaaatcgaatcgaaaaaagaaagaaagatcatattcatggcgatggcaagcctggctcgacggaagggttacgccgtgttttgtcgtcgaggtcgtcgttttgtctgacaagctggaggggattcgcgtccggatctgacgaaaacgacgtcgtcgtcatcggcggcggtcccggcggctacgtggccgccatcaaagccg

SEQ ID NO: 26713 - DNA, 252 bp, Glycine max
  Clone ID: 701097241H1
cttgctttagccatcactaacactcagtctctgaattggggctgagggtttcgagtaacgtttatttttcacgagtttaagatatcatgggtaaagagaaggttcacattaacattgtggtcattggcatgttgactctgggaagtcaaccaccactggccacttgatttacaagcttggaggtattgacaagcgtgttattgagaggtttgagaaagaagctgctgagatgaacaagaggtcattcaaata

SEQ ID NO: 26714 - DNA, 176 bp, Glycine max
  Clone ID: 701097242H1
cctcgagccgacttcggctcgaggtcgttttcagcgcgcatcactctttctttcgctttctctctcttcctcgtacgcttcactccccgaaatggagcagtctctgctgagacgcgaaagagtgaccagataaccggtcgcggggaatattccggcgctccgatgctatcacctac

SEQ ID NO: 26715 - DNA, 245 bp, Glycine max
  Clone ID: 701097244H1
ctcggaaaatttttcagagcttcctaaagcctttagaattctctggaacctttttgttcgtccgccgaggatcgcaattcctccaaatcgtcgtcactcgtcgcttagttcggttctaactgcatgaacggttcgggaagctggattcatcatcgtcgaacttgaacttcaatcacttcgttacttgtctgttgatttttatcctccatttttcgcctcaatcgctctcttccaccttcgatagt

SEQ ID NO: 26716 - DNA, 257 bp, Glycine max
  Clone ID: 701097245H1
caatcttctgagagtgtttggttgaaagtagcaaagatgtttcctttcgggcaaaagggtcaaaagataaaggggactatggtggttatgcagaagaatgtgttggatatcaacagcatcaccagtgttgggggatcgttgaccaaggcttaggcttcataggcagtgcagtcgatgcacttacttttgcagccaccaaaatctccatccagttgattagtgctaccaaggctgatggtgggaaaggaagaattgga

SEQ ID NO: 26717 - DNA, 262 bp, Glycine max
  Clone ID: 701097246H1
ctcttctctctctcgccgtctagcaattttctattttctcctctcatggcttcagattccaaaaaggatttccctgctgatgacaaagctggaacagaagagagtaaaacatccaaagatgagacttcatctaagattctccagcagaacaaagagcgacactacttttggacctagacctggacctgctgggcatccaggcaacccttttgatctctcagcaatgtctggtctgctcaatgatccaagtatcaaggaattg

SEQ ID NO: 26718 - DNA, 129 bp, Glycine max
  Clone ID: 701097247H1
cgactgtgcgtgtttctctgcatgggaggcaacagcaccacttggatgaacactgccgttttggcaacatgcattcggaacttccgttcaaacagaggacccgtttcggggattctgaaaggctttgta

SEQ ID NO: 26719 - DNA, 268 bp, Glycine max
  Clone ID: 701097248H1
agaactcttggattcagcccttactgggaaatctagaaaccttggaagtaatagattgttctagtttaaaagacttggtaccatctacagtgtctttttccaatctgacacatttgcaagtacaagattgcgacagcctgccatattgttcacatcctccacagcaagaagtttgggtcaactcaaaacaatggagataagttactggtattcattgaagaggtagtagtctctaaaggaggggatgatcacatgaggaggagatata

SEQ ID NO: 26720 - DNA, 271 bp, Glycine max
  Clone ID: 701097249H1
taaaccctaattctccttgtttccattgctgcttcattgttttttaagcaattccgagcattgatcaaatgggttttggttcacttccaattttctgaaacagcgtactctcaaaaaaaatatctgatcacattttctcttctgcaaattctgcatttttttccctctctttctttctggggtgtctgcagaacaagggaatctcacagattccttgtgtttctctttggtttccggtctcaaaatatcagcttttggatttttagtgttg

SEQ ID NO: 26721 - DNA, 266 bp, Glycine max
  Clone ID: 701097250H1
tgcctcctttgactttgtggctggtgctgccttttctcgtgttgctagcggcggcaacaacgtctccaacacgcgccacgacggtcgcctcgtcgttccacggtcaacgagagtttgactatttcgctttcgcgtgcaatggcccggtacttactgcaaacgcacccgcagttgctgccccaccaacggttgctgcagaggctccaattttccaacagtgttcaccatacatggactctggcctgactataatgatggaacctggc

SEQ ID NO: 26722 - DNA, 261 bp, Glycine max
  Clone ID: 701097251H1
tggatgccttggctctgagaggcgatgaaggacgtggtaagctgcgataagccggggggagctgcacacaagcattacatccccggatctccgaatgggacaacccagcacattgaagatgtgttatctcgaagagaggccaacctcctgaactgaaacatctaagtagggagaggaaaagaaaacaaactagtgattccctgagtagtggcgagcgaaaagggaatagcccaaacttgatccgcgtgcggatcgagggtt

SEQ ID NO: 26723 - DNA, 258 bp, Glycine max
  Clone ID: 701097252H1
tggatgccttggctctgagaggcgatgaaggacgtggtaagctgcgataagccggggggagctgcacacaagcattacatccccggatctccgaatgggacaacccagcacattgaagatgtgttatctcgaaagagaggccaacctcctgaactgaaacatctaagtagggagaggaaaagaaaacaaactagtgattccctgagtagtggcgagcgaaaagggaatagcccaaacttgatccgcgtgcggatcgag

SEQ ID NO: 26724 - DNA, 253 bp, Glycine max
  Clone ID: 701097253H1
cttttctttccttccattgaatttggatggctggcggcggaggtggggaccggccgccgtggaaggaggcggcgccgccacgacccaccatcactctgccgccgcggtcgggttccatggagaccctttcaatggagggttcagccctggtcccatgactctgctttctggctttttgggtgatggggatgatggaaagtccttctctcagctcctcgccggagctatggcttctccggtggccggagctgtc

SEQ ID NO: 26725 - DNA, 250 bp, Glycine max
  Clone ID: 701097254H1
ttttaatcctgcaaagatggaatcttgtgcgcaattcgggttgtgggtggtcttgatcttgtgcttggcgtttcaaattcaacccaattatgggttctaccttccgggcagttacccccacaactatatgtcacggatgagttgtgggtgaaggtgaattccctcacttccattgacacagaaatgccctttagctattacagcctgcccttttgcaagcccgacggtggcatcaaggacagtgccgaga

SEQ ID NO: 26726 - DNA, 250 bp, Glycine max
  Clone ID: 701097256H1
tgatcactggatcttctgggtgggacctttcattggtgctgcacttgcagcactctaccaccaggtcgttttcagggccattcccttcaagtccaagtgattcaatcaaaccgttcatgcttaatcagttgggaacaacaaaaaaaatcaaaacaatgtttctgggtttcggtttcatttcatcaagatgatctgtttatctttttttttttaattttaatttaaagtctttgtattttgtatgtaaaga

SEQ ID NO: 26727 - DNA, 245 bp, Glycine max
  Clone ID: 701097258H1
cacaagccaagtgaaagtgagaaaaaataagaaccaaagagcataatgtcagggatcattcacaagattggggacacccttcatgtgggagggcacaagaaggaggaggagcataagggtgagcaccagctggagaatacaaaggggagcaccatggtgaacacagtagtgagtacaaaggagagcatcatggtgaacacaaagctggagagtaccatggtgagcacaagccagagcacaaagag

SEQ ID NO: 26728 - DNA, 255 bp, Glycine max
  Clone ID: 701097260H1
atgagttttgcaggttttctttctcttcaatcaatgtctgctacctgcggcttcttcttcttctccttcacccttctcttctccttcttctccttcctcgtcttcatctccaggatgaagccctggtgtactgcgatctttgcaagagctacttgacggtgagttggctgaaaaagttccccaatctctgcgactggtacactcatctcttgcgtaaatccccaaccggcaccatccacgttcacgtgctgggga

SEQ ID NO: 26729 - DNA, 257 bp, Glycine max
  Clone ID: 701097261H1
tttttgaatactttgagcatgagacaccttataatcgtgaaccattggcaaataagatttctgatcttgaacggcaatttccagagttgaaaacatactggagctgtgatctttcccctgcaagttgggttcatttgcttggtacccaatatacagaatacctactggtccaacattacaaagcttgagtgcctgcttcttgacctttcattccctgtcaacaactttgcagagttcaaatactgatgggctacata

SEQ ID NO: 26730 - DNA, 114 bp, Glycine max
  Clone ID: 701097262H1
agatgatccctctagaagagcagtattataataatctatgtctttattctagttacttcgttctctatttctatttaatagaatctttaggaaaagcataaaatttctgtcatg

SEQ ID NO: 26731 - DNA, 278 bp, Glycine max
  Clone ID: 701097263H1
tctcgccgtcgcagatctcgccgcagatctgaacaacaatggacggttacgacggcaccgtcaggctcggtgccatcaacctcaagcacgatcgcgccgccgatttcgactccgccaccggcgcccccgacgtctccgtctccctccggtcacgcgccagatagccgctgccgccaaacaattcatcgagaatcactatagaaactatctccaaggattgcaggatcgcaaagacagacgcagagcacttcagaggaaagtgcaagaatctcaggtat

SEQ ID NO: 26732 - DNA, 86 bp, Glycine max
  Clone ID: 701097233H1
ctgatccacaaatgtcaattttgtgcatgctcatcactgtttcacttcttggggtgttctttttcacaattttaaatttgttgggg

SEQ ID NO: 26733 - DNA, 233 bp, Glycine max
  Clone ID: 701097202H1
aaaagcatacatagcgttttttattttgacatacatattatatatagtgcaaatttgaaaggtgaagcctaccaactcatctgtaaaattgtgaaagcaggaaagttgatgttatagtaccttttgtaatcaacttgctcagtattttgaaaatattttcatatgtttggtggagaaatttacggcattttttttgaagataacagaacaatcaaaaaaaaaagggggggccg

SEQ ID NO: 26734 - DNA, 266 bp, Glycine max
  Clone ID: 701097203H1
aaatcatccagagaggatgcaaaaatgtaattagcaagctccaaaggagaatagacaaggaaggccatcaaattgtacctttgctaacagatttgtggaagaggatggagaattctgggcatgcaggtggatctgggacaatctgttggatttacggaagattgaccagcggattgatagaatggattatagcggagtaatggagcttgtgtttgatgtacagttcatgttgaggggtgcaatgcatttctatggatactcatatg

SEQ ID NO: 26735 - DNA, 164 bp, Glycine max
  Clone ID: 701097208H1
gagaatgcgggttgtttgttgctccaattcaggcgtgagtgccactcttccatctttcccttgtcccagattccctccactcattgcaatttcttcgatccgctttctaaattccacacccctccgttccttgcttcgccgcgacaagttacaagaatggcttc

SEQ ID NO: 26736 - DNA, 256 bp, Glycine max
  Clone ID: 701097209H1
ctcgagcgcttaaaaatattcagtgaagatcaacctcaatggcatctcttggcgtgcgaccagttcttccccctccattaacttccatctccgacccacctcctcttttcgatggcaccaccaggttgtactcagttattcttgcccctatgcacaacgtgtgtggatcgctaggaactacaaggggctacaagataagatcaatttggtccctattaaccttcaagacaggccagcttggtataaggagaaagtc

SEQ ID NO: 26737 - DNA, 256 bp, Glycine max
  Clone ID: 701097211H1
ccggaaaggcgtgccagcgtcagagagactcatcagttctcactcgtacggcgcttttgctttgctttgcttcatttctttcatcgtcatcataaagttcgttcctttctcagttttcacccatacccagatagtaacagcaccatctcggatctgtgtccctcctttgagtgaaaaaggttcaatctttggtctctggggctgttggggttccgtcattgaagaagaagaagaagaagggtattattgttattat

SEQ ID NO: 26738 - DNA, 257 bp, Glycine max
  Clone ID: 701097212H1
gttggacaagaacaggagaaaggcaagctgcaagaatgagagttaggtaccttaaagcagttctcaggcaagaagtagcatactttgatttgcatgtcacaagcacatcggaggtcatcaccagcgtctctaagatagcctcgtaattcaagattgtcttagtgaaaaggtcccaaactttttgatgaatgcgtccatgtttgttgggagctacatagtggcttttgcattattgtggagattggccattgtggggt

SEQ ID NO: 26739 - DNA, 261 bp, Glycine max
  Clone ID: 701097213H1
tcgacaccgaacaaggctttgttgatgcgcgcagaaacgaacatgatgctgatgagtcccttaaacgacggaaagccccacgcttcgaagcttcaccagctcgacattgaaacggggaagattgttacggagtgaagtttggaaaagacggtgctgacttaacgatgagggatatcaccaatgacaccaaagggtcgcagttggacccttcggagtcaacgtttttggggctggatgataaccggttgtgccagtgggaca

SEQ ID NO: 26740 - DNA, 261 bp, Glycine max
  Clone ID: 701097214H1
ggagcggagaggttttcccacgaccatgctcccttgattctgggtctccagccatccgccctggtcgacaacgttgccaccgtcgattggtccttgctccatcgcattcccggcgagcgcggtggctccatccctgccaaattgaagaactggaatccatactgagagaggttaaatccaaatcccacgatgacatcaaaactctcgctggtggcagcgttgccaacacaattcgcggtctcagtcgcggttttggaattt

SEQ ID NO: 26741 - DNA, 271 bp, Glycine max
  Clone ID: 701097215H1
ggtgaatagccttcatttttatgaactttattctcactctcatcaacaccatcaataaaaatttccttttaagatctgccctttccccttcttcacagtttttatcttattctccaaaatctacaatggtcttacactatcctgattaaagttgattttttttctatctgggtacatgtaaagttgatgtttttattctcaaattgaaccaaacatcaggttttctggaccactttgctgctgaatatagatgtcagctactatactttgc

SEQ ID NO: 26742 - DNA, 289 bp, Glycine max
  Clone ID: 701097216H1
aatcgcatcgcagaagcagtttccggtgcatctcatcgtctccgaaaatgaacgacgcagatgtctcgaagcaaatccagcagatggtgcggttcatccgccaggaagctgaggaaaaggccaacgagatctctgtctccgccgaagaggattcaatatcgagaagctgcagttggtcgaagccgacaagaagaagatcaggcaagaatacgaacgcaaagagcgccaagttgaaattcgcaagaagattgagtactcaatgcagctgaatgcttctcggattaaagtt

SEQ ID NO: 26743 - DNA, 270 bp, Glycine max
  Clone ID: 701097218H1
tgtggaagaggaacgtccaccctcagcctcagcctcaccctctccacctccaccttctgaacctgtgaaagtggacgcaccaccagtacaaccaccacctgatttgttgaatttggaggatcctgttcctgctgctgcgagttggaagagaagaatgcattggctttagccattgtccccgttgctgttgagcaacaaccttctgctgcttcaaatcaagcaaatggaactacaggatgggaattggcacttgttactgctcctagttca

SEQ ID NO: 26744 - DNA, 262 bp, Glycine max
  Clone ID: 701097219H1
cttggcttaaacccctctttgcagacttacactttgcttctcagttgttgtacggaggcacaatcaccgtatgatatgggattttgttgtgagcttatggcagtctctggccatcctgcacatgcatttttacatccatgccagcagcaggacctgatggtcaaaatgtgcgggatcatgtaagcaaattcttagaccttatgcattccgaggatagagagggcaaaagagggcttgtagatgcagtggtggattttcttca

SEQ ID NO: 26745 - DNA, 258 bp, Glycine max
  Clone ID: 701097220H1
ggaacatgatttagaaaactgccaagcccacccatattcattctctcaaaacttccaaccatgaactgaagcaccacacatacccacttcctccaaagacatcatttttattaccaatcttccaatttcagaaaaattctttgtgggcatctcttaattaaaaaaatgtcaagcttccccaacacggtggcggaaggccgcaggtccagcaaggcaccggaaaaatccactttttctcagacttgcagcctcttgagc

SEQ ID NO: 26746 - DNA, 256 bp, Glycine max
  Clone ID: 701097221H1
gatagtgaaagagcttcttcctctaattcgagtgtacaaggatggcagcgtggagcgtcttctaagctctgaaaacgtggcagcctcccctgaagatccccaaactggagtctcatccaaagacatagtctcgcagacaacccctacgtctccgctcgcattttccttcccaaatcccaccacactaacaacaaactccccatcttcctctacttccacggtggcgccttttgcgtcgaatccgccttctcctttt

SEQ ID NO: 26747 - DNA, 254 bp, Glycine max
  Clone ID: 701097223H1
gagatttcagagcgtgatgaaggtgctctcaagtttcttaaagatatcaagtggagcaggatagaaaatcctaaaggattcaagcttgagttcttctttgataccaatccttacttttcaaataccatctgacaaaaacatatcatatgattgatgaggacgaacctatattggagaaagccattgggacggaaattgaatggtacccgggaaaatgtttgactcagaaggttttgaagaaaaagcctaagaag

SEQ ID NO: 26748 - DNA, 255 bp, Glycine max
  Clone ID: 701097225H1
tctcgagccgaatcggctcgagcggtctcgagcactttccattctcttcaacctaacgcagcatcgctatactcttcattacatggctttgcccaatcagcaaaccgtggattaccctagtttcaaactcgtatcgtcggtgatggtggcacaggaaagacaacctttgtgaaaaggcatctcaccggagaattcgagaagaaatatgagccaaccatcggtgtggaggttcacccattggattttttcacaaac

SEQ ID NO: 26749 - DNA, 171 bp, Glycine max
  Clone ID: 701097226H1
gagagagagacagagacggatttggaactttggatatctatagcgaaagcgtgacaccaccaaaaaccgaactgttcacagatctctctctcactcttccaacaatcgaaatccataaccctaccgacacacactcaatcgaaattcttcattctcttctcatcgatgggg

SEQ ID NO: 26750 - DNA, 256 bp, Glycine max
  Clone ID: 701097227H1
agagaaaccaagtaatactagccaaaatatgtctcccaaatacatgtcccttttcctcctagtaatactagggatggcttttctggccactacttcccttgctgatcgtcgttttctttcggtggaagatgtcatgatcaccatcaccaccacccaccaaaaaaacactggcctccaaccacacaaaatgaaccttcaaacgtagaaaacaaggagaacactgaggtggaggatggtcatgatcatcaccatcact

SEQ ID NO: 26751 - DNA, 221 bp, Glycine max
  Clone ID: 701097229H1
gttgaggcagagagagcgtaatcataaagtccgtccgaaacaaaaagtcgctccctccctcccaccatgcttcactcccgaaacggctcataattcataaacaacgtttcatcattaatacggtgccgtttcgagatgttcaataacatagagccacgtggttggcgacaagctaagacatgactacgcggtttcgctgttatctttgttccacacaacat

SEQ ID NO: 26752 - DNA, 264 bp, Glycine max
  Clone ID: 701097230H1
tcctcactcacaatcacaatgatggaggaccaccctctctctgcgcccaaagacgaaatggaaaacctcgtactccacgacggcgcggacgacaacggcaacggcaacgatggcgccggtgcaaaatcaccgttctctccaattaccgcagcgccatgtccacgctctccgaatctcaccaccaccctctctctccaccgatcctcgccactcccgccgactccgatcccctcctctccccaaaccctggctcccccgactcct

SEQ ID NO: 26753 - DNA, 217 bp, Glycine max
  Clone ID: 701097231H1
cttatcttcttatgacactttgagagttcaagttttctttttccccaaacccaaagattttaggttacagaaaatggcattggaactcatggggttcccaaaactagacgaacaaaaggccattcaagaggccgaatcagaaggctcaaaggcatggagcacttgattcgaactctctccaaccaaccctctacattaaaacacgaactcaccgatg

SEQ ID NO: 26754 - DNA, 285 bp, Glycine max
  Clone ID: 701097232H1
cggctcgagataaattccaagaccaagagtggagagaaggtaggaaaagaagccatggaccataaggtgcagaaactgcaaaagaaactatatgaacctgctgggacgagtaattccaaatttctgtgtgaagtctgtaatgtctattcccttgcgagattgctttggcctcacacaaaaatgggaagaagcatttggctaaaattagaacttcaatctgaagtgtatatttgtaacaggtatacgagtttacattgaaatttggtaggaagtttggacatagag

SEQ ID NO: 26755 - DNA, 277 bp, Glycine max
  Clone ID: 701097201H1
ctcgagcgctttttctccctgtaattttcctttttaggttttggttatcggtggaggtgatggaggggtcatacgagaagtagcacgccattcttcagttgaaaagatagacatttgtgaaattgacaagatggttgttgatgctccaaacaatacttccctgatgtagctgttgggtatgatgatcctcgtgtgacacttcatattggtgatggagttgcatttttgaaggaagttccagaaggaacttatgatgctgttatagtggattcatccg

SEQ ID NO: 26756 - DNA, 250 bp, Glycine max
  Clone ID: 701097170H1
agagtttctacaaagagttcacatggtgggaatacaagaaggctgcgtacgcgtcaaggctagcggataatagactcggcccttttgagaaatctgctgctgattaaggaggcaaagtgtgtcaaaattctactactcaattttggcacgtgttgttaggccaacttttttatttttgattttttttgggtgtgtgtatctaggttccaaacagttgactttacttgagatatatagaaaatgaataggt

SEQ ID NO: 26757 - DNA, 254 bp, Glycine max
  Clone ID: 701097171H1
gtaggatgttagtggagcaagttgtccgaaatttagtcatcactgagaatggcaattttggatttccggatatctgaggaggacattttcgtaaatgaactttgaaagttaacgtttgtttaacaccatcacacaagggtcaaagtaatgtcttcagacaacgggggtgtatgtgtaattagattaaatctcaataggtgttattataatttgttctttattttataatctatcatcggttctaagtgaaagtc

SEQ ID NO: 26758 - DNA, 255 bp, Glycine max
  Clone ID: 701097172H1
gcaatttagcttgcacatactcaagcattccaccattgtggcaaagccaaggtcattttagactccaccacatgatcatgatcatatgatcaatccccttaattttttcttttttcttttcccttttctttactctgtattgtatcaatgcttgaaaatggggttgttccaaaaatgtcatatatatttggcctgctaatgggtattgtaaatctctgaacttgaagtgatgcacggttttgagatggttttcta

SEQ ID NO: 26759 - DNA, 254 bp, Glycine max
  Clone ID: 701097173H1
cctcgagccgattcggctctagaagccccactcaaccaccacacctcacctcgttcacgctacccctttctgctcttcttctacctttcaagttttaaaagtataaagatggcagagacattcctatttacctcagagtcggtgaacgagggacaccctgacaagctctgcgaccaaatctccgatgctgtcctcgacgcttgcctcgagcaggacccagacagcaaagttgcctgcgaaacatgcaccaaaac

SEQ ID NO: 26760 - DNA, 251 bp, Glycine max
  Clone ID: 701097174H1
ttagattcctctcatctcactctcaacacataccagtagcagaaactagatctagcctaagatggagaagttgcaggaaattgcagcatccttggctgttgattatttgcttccacccttgatgaaagctgtgacctcagtcatggaggttccaaaagatgttgcagagatgaaagacaaacttgatgggattcaagccatcatttctgatgtagataagatggcagcagctgaagaatgcaacttacatg

SEQ ID NO: 26761 - DNA, 251 bp, Glycine max
  Clone ID: 701097175H1
aggaacttgaagacggggagctcggggatgatgctgagaactagttgttctttcctaacctttttgcagttatgagataaagaacttcacctgcatcttttggagaatactgactttatttaagtacatttaattgttaattctctggcctctgggcacatctatgaattttgccctcaaatgtaaagaaatcttttggttctcgttatagttctgacaatttctatgaccgcttaattttataccaagag

SEQ ID NO: 26762 - DNA, 252 bp, Glycine max
  Clone ID: 701097176H1
cggctcgagtgaaggtgtacggtccaacctatggagcccccaagagggtgctggtgtgtctgattgagaaggaaattgagtttgaaacagtacatattgatctcttcaagggagagaataaggaacctgagttcctaaagctgcagccatttggatcacttcctgttattcaagatggtgattatactctctatgaatctcgtgcaataatcagatactttgcagagaagtataaagaccaagggacagact

SEQ ID NO: 26763 - DNA, 255 bp, Glycine max
  Clone ID: 701097177H1
ccggtttttaccggcgcggtgcctgcggaaatcaggttttgtacttcgacgctgtcctacgcgccggcatggccggtccacgtggctttgcgtttggctacaatcatcatcccgttgcggcgagtgagttccacgcgacgacgagcgactcggactcttcctctgttatcgatctaaaccataatgaaggcgaggttaaggggaacggttctagaatcttcgatctggaccttaaccatcctcctccgcatgaga

SEQ ID NO: 26764 - DNA, 258 bp, Glycine max
  Clone ID: 701097178H1
ctttaagaaaattctggaagagacagggaaagtgagggatgagcataccgaggacatttcagtttcccaagctatttcaattgtgctagataagcaccctgatctaaggcaacaaggacttgcccatgaagtgctacaatggtttatatgcagaatggaagcttggtttgctgctgatgcagatatgatttcactgaaaacctgggatcaggaacatgtcctgtctggtggtcatggactcatggtgcaaggatatga

SEQ ID NO: 26765 - DNA, 256 bp, Glycine max
  Clone ID: 701097179H1
cttcaaccctctagatcgaaaggccaattttctttttcttttagttcttgttattatttcgcatcctttttaccttttcaattcttcaaaaattctcgcgactgaattcacgtcagaacacggaaacataaagttcagttttttgcatcgtttttattaaaatttgttggcgaacaaaacagagaaaaaaaaaccaaaaaattgaaatttcttatccgttttggcgaattgaactgcgtgttcaattgggttgttg

SEQ ID NO: 26766 - DNA, 249 bp, Glycine max
  Clone ID: 701097180H1
ctgtgttttcctttcgtttattaaggttgtttctttcgtgcccacatgttctcttctccaaaatcctctcttttatatttcccctttgataatttagggtttggtattgtgatagagacacaataatttttgggaattcttgtgacacgggatagttggagaattttgttttgtattttgcttgtgaattagggttggttgattcttttttacagcattgaagttatctactctctcattaatattttt

SEQ ID NO: 26767 - DNA, 266 bp, Glycine max
  Clone ID: 701097181H1
atataattttatcccaacccaaccacacatacactatattctctctctctctcccccccatttcccgcatacacagagcgatagcaaacctactttagtttctttcgcttttcttccactaacgcaaaaagactcaccagtgctcaccacaccacccctttttcttttgctttgcgtgtttttggattgttgtagatctaaaagataaagatgattcaagaaatgttgggtggtgctagtgctagccacataccaggagaaagaaa

SEQ ID NO: 26768 - DNA, 261 bp, Glycine max
  Clone ID: 701097182H1
tccgctttcacttcttctctctcaccctccaactatgagttactacaaccagcagcagccacccgtcggtgttcctcctccccaaggttacccaccgccggaatcttacggaaaggacgcgtaccctccgccagggtacgctccacatggaggataccctccgcaggcgtatccagcacaggggtaccctccaccctacgcgcctcctcagtacggtcagcctccgccgcaacaacaccagaattcatctggcccgggttg

SEQ ID NO: 26769 - DNA, 255 bp, Glycine max
  Clone ID: 701097183H1
gagaatatgaagaatttaaaattcgcgtcaatggacttgttgcgaaggcacaaaaggttcctgaagaaggatgggtgatgcaagatggtacgccatggcctggaaacaacactagagaccatccaggaatgattcaggttttcttgggccaaagtggaggacttgacaccgaacgtaatgaagttccaggttagtctatgtttctcgtgaaaaacgtccagggttccaacatcacaagaaggctggtgccatgaa

SEQ ID NO: 26770 - DNA, 241 bp, Glycine max
  Clone ID: 701097184H1
tttgggagttaggttctgcacgctctgcttccagcgagtgttctttcttcgtttcaacaccttaatttgcacacgctgcttcttcagcttgagaaatggcacaagaaacctttctattcacatctgaatctgtaaacgagggtcaccccgacaagctgtgcgaccagatctctgatgcagtgctcgatgcgtgccttgaacaggaccctgacagcaaggttgcttgtgggacatgcaccaa

SEQ ID NO: 26771 - DNA, 257 bp, Glycine max
  Clone ID: 701097185H1
cgccattagtgaaccttgaaaccttaacagagtaaacttgcttgcagcgaatccagattcggaggaggagtgagtggtccttgttgctgatttggcaacaacaaataaagatgatagtttgagtttgagtttgtgtgaatccagatctgagtttcatttcgcagttttgcggagaagagaacaatggagtcagcaacggtatcatcatcggagtcggagacggcgcttcctcttcctctggcgtcggagtcacagca

SEQ ID NO: 26772 - DNA, 251 bp, Glycine max
  Clone ID: 701097186H1
attattatagcaggcacctaatagatagatagatagatacgtagggatagggttaaggccatggagcgcatcatctgcgccaagtacaagctaggtcgcaagatcggaagcggatccttcggcgaaatctaccttgcgacgaatattgataccttcgagatcgtcgccgtcaagatctagaacggtaaaacgaagcatccacaattgctttacgaggccaagctctacaatattcttcaaggagggagtgg

SEQ ID NO: 26773 - DNA, 248 bp, Glycine max
  Clone ID: 701097187H1
gattaatgaaaatcccgaggcaggatgggaggctgctataaatcctcgtttctccaattatacagttgaacaatttaagcgccttcttggagtcaaaccaatgcctaagaaggaacttagaagtacacctgctatatctcacccaaagacgttgaaattgccaaagaattttgatgcgaggacagttggtcgcagtgtagcactattggaagaattctagatcagggtcactgtggttcttgttgggc

SEQ ID NO: 26774 - DNA, 51 bp, Glycine max
  Clone ID: 701097189H1
atgaggaggaggacaagtccactgtagcattgctcgactgtgttgttgtgc

SEQ ID NO: 26775 - DNA, 251 bp, Glycine max
  Clone ID: 701097190H1
ttgctgttagggacatgcgtcaaactgattatgtgggagtcatcaagaacgttgagaagaaggatcctaccggagtcaaggtcaccaaggctgcccagaagaagaagtgaatcgttcgggctggttcatcaggggatgttggttacaataaatgttggtttcttttctgtactcttgtgtcttcttttctaggtagcttgtctttcggacaaagtttgaagtctccaccatcatctcgcaacttctgttcc

SEQ ID NO: 26776 - DNA, 251 bp, Glycine max
  Clone ID: 701097191H1
atgaggtttgaaggtgaagaggctccagagcagaggtttactggtaccattgttggaatagaagattctgatcccagaaggtggagagattccaaatggagatccctcaaggtgagatgggatgaaacatccaacacccctcggccagagagagtttccccttggaaaatagagcctggtcttgctcccccggctctaaatcctctttcaatgcccaggcctaaaagagctcggtctaatgcagttccttc

SEQ ID NO: 26777 - DNA, 256 bp, Glycine max
  Clone ID: 701097193H1
agcaggtgcgctggccttgatcgttcggcagccaattggggccaaagcagtggtgaatgaggaatcagcagtggctggactaattgggatgatgcgttgtggaacaccgagaggtaaagagaatgtggttgcagcgttgcttgagttgtgccggagtggaggcgcagctgcaacagaaagagttgtgaaggcaccagctttggccggattacttcaaacccttcttttcacagggacaaaacgcgcaagaagaaaa

SEQ ID NO: 26778 - DNA, 257 bp, Glycine max
  Clone ID: 701097194H1
gatttatttaagctccttgattgatcagtcagattctaaaaattaacaccacctccttccaccttaaaagaaatctcatttccatatgagagtgagtttgcatctcatgactctggagaaggtgtatagctctcaggattcgtactaatcaaatatttttaattacatggattcatgcgagaatctcttcagtagccttttgttttcctttgatagacatttgaagtttgaattcacttttgtttagctcatctaaa

SEQ ID NO: 26779 - DNA, 235 bp, Glycine max
  Clone ID: 701097195H1
ctctctctctctctctctctcacattcttgtttcttattatttatatttgtcttttccatgatgggcattgaacagaaactgtagaagcctgtcgaacagtgaattgtaatagtggtaaaatgaaagaatgaatgggtatatatatgtgtgggagtatacatatatagatatagatatggtggtgcagctgtggtgatttggcattttctggtttttgttcggtgcatgtaggta

SEQ ID NO: 26780 - DNA, 268 bp, Glycine max
  Clone ID: 701097196H1
ggtacatgttgttgatggttcatcacagcagccagatctcgagtttgacgcagttcgtctagagctgaagctatttaatcctgaacttgctgagaagccttatgtagttgcttttaacaaaatggatcttccagaagcatatgaaaactgggaatccttcaaagaaaagttgcaatctcgtgggatcacaccattttgtatgagtgctgtcaaaagggaaggtactcatgaagttatctgtgctgcttatgagcttttgcgtaaaaga

SEQ ID NO: 26781 - DNA, 258 bp, Glycine max
  Clone ID: 701097169H1
cgcgccgattgatatttgggaatcgcagtattcgaaatactactatggatgcaaagagagagggcgacatttccgtcctgctgtacgtgagcggaagtccaaaggctacttgttaattgcaactagtggaggactgaaccaacaaagacatgggataacagatgcagttgttgttgcaagaattcttaatgctacactagttgtacctgagttggatcatcaatctttttggaaagatgacagtgactttgccaatat

SEQ ID NO: 26782 - DNA, 257 bp, Glycine max
  Clone ID: 701097137H1
aacgatgatgaggtggaactatgggtggttagaggattaactgctaagttaattgactgtaagatggaccaaatgaatcaagttgtagttgtcagtcatcctactgagcgtgtgtttggtcagcaccaatggcaagcactgagaacaaagctagtgacatggaggggaaatattgtaaatgttatcagtaccattcaggccaacaaaataacggaggatgggtcccaggcagcccaaggtttggttgttcgtagagg

SEQ ID NO: 26783 - DNA, 252 bp, Glycine max
  Clone ID: 701097140H1
ctggaaaaccctgtttttcttcaatagaaagaagtgctggttttctcagatagggaacttgctgccagtggctttactagaaagaatgaagaagatattcaaaggttcattgaaggcggggcagaaagtgatacaaattcagatagtgaaggggttgacttagtggaagacctgaatgaagcagacactgtagatggtgattcttcacatttgtcagtggaagagctgaatgaagcagacactgtagatgat

SEQ ID NO: 26784 - DNA, 255 bp, Glycine max
  Clone ID: 701097141H1
caaaaacatcatcacagaaactcacaaaggaaaaacaaacaaacaaacaaaatgtcttctccaagcaagcggcgagaaatggacttgatgaaactgatgatgagtgactacaaggtggagatgattaatgatggaatgcaagagttttatgtgcacttccatggacccaatgagagtaaattctcctttgtttatatctttgttacatgttttgaagctttttgtgaattgttttttgtgaaaaaagttgggttg

SEQ ID NO: 26785 - DNA, 249 bp, Glycine max
  Clone ID: 701097142H1
gggctatcaagagaatggccctgaacgattttttcgcgggggagatcgcgacggagcttctgaaaatgctgatcagcatctcccgcaagtccctcctctgccgcgccacgccgaccagctcatcagctacatccacgacctcctcccctccatcgaggagatcaagtactccggcgtcgagcttcctgcactgcgccaatcgcaactcgaccgtctctcggagattctccgctccggcgtcgagctctc

SEQ ID NO: 26786 - DNA, 256 bp, Glycine max
  Clone ID: 701097143H1
tctcggccgattcggctcgagttcacaaccgaaacagtttccatcactctcacaaaatgacgacaatatcagattgctccctactcttcctcttcgtcttcctctccaccctccacatagcttccaccctctcaacccgcaccaacttcatcaagtcctcctgcagcaccacccagtacccagccctctgcatccagtccctctccgtctacgcgtccaccatccagcaagacccccacgagctcgtccagacagc

SEQ ID NO: 26787 - DNA, 261 bp, Glycine max
  Clone ID: 701097146H1
aaatcagtatattcccttttgttcaattactcttcttccttccttaaacccaatcaaagagaaacaaaatgttcttccacaatccagcacataccacctgacccgaaaacccagtttgtgggtttatactttgattgattgattaattaattattagttagttagttaatcaatggaagagtgtcacacggtgttcggaaagtacgagatggggaggcttctggggaagggcacgtttgccaaagtgtattacgggaagca

SEQ ID NO: 26788 - DNA, 264 bp, Glycine max
  Clone ID: 701097147H1
caaaatggggaaccaatcctcttcaaacaagatagaaactcttcccatcgacacaacatttaagctcccagcaaatataccagtttggccacaaggtggtggatttgctactggaaccatcaacataggagggctaaaattgtttcaaatttcaacattcaacaaagtttggaaaaccttagaaggtggaccaggtgatgcaggggcagctttctttgagccagcaggaatacctgagggcttcttcacactaggccactacag

SEQ ID NO: 26789 - DNA, 269 bp, Glycine max
  Clone ID: 701097148H1
agaaggccgaagaagtatcaaattaacacattctcgatcgagaagaagaagaatgtggacgcggatactcgcacgagcaacacgtgcagttaccgttgccggcaactattcacccattcaccaacgcatctgtgaccctatctttctcaaaatccccaaatcaacttttccccaaattttcaataaccctcgatttttggtcacctccaacctcgacaatgagctctcaccggattcttcagtgaacagcggtgacagacagctcgcag

SEQ ID NO: 26790 - DNA, 261 bp, Glycine max
  Clone ID: 701097150H1
cgaaattcgatttcccccaatttctagggtttcgctgaaaccctaccctgcgattttgcgattcttccttcgaactttacttggttttcagttcccttttaaccatccagatcaccatgtcaagtttggacgagccagttggccttgacaagttgccaagcatgagtaccatagatagactccagaggttctcatccgctgcttgctgtcccagagtagataattttactttgggtctgggaaactgctggattgaaggac

SEQ ID NO: 26791 - DNA, 262 bp, Glycine max
  Clone ID: 701097151H1
tctcaatcgttttctacataatacaaacctctctaatttttgaagcttattatacccaatctcgatatgcagatcttcgtgaaaaccctaactggcaagacgatcaccttggaggtggagtcctctgacaccatcgacaacgtgaaggccaaaatccaagacaaggagggcattcctccggatcaacagcgtttaatcttcgccggaaaacagctcgaagacggcagaaccctcgccgactacaacatccaaaaggagtcca

SEQ ID NO: 26792 - DNA, 255 bp, Glycine max
  Clone ID: 701097152H1
gtctttcttcctttgtaatagaaagcacgcgtttctctctctccctctctcaacgaatatttgtgtacttcctcttttgtgggtagattcaatttaccatgtcgagttcatcggaatactctcaattttccggccagaaaccggcgaggtcgccggagaaatcgagcttctctcagacttgtagcctgttgagtcaatacatcaaggagaagggtacttcggatatcttaccctcggaatgaatcatgtgggcca

SEQ ID NO: 26793 - DNA, 257 bp, Glycine max
  Clone ID: 701097153H1
ctttctggagttctcgccattcatcacccccaccaatctcctcctcctccgtacacatggccacgcttgccgattcttttctcgccgacctcgatgaactctctgataacgaggctgaaattcccgaggataacgatgtggatgccgcagacatggaagaggatgtcgatggcgaccttgccgacctagaaaacctaaactatgatgacttggacagtgtctccaagttgcagaaaacccagaggtacactgatgtt

SEQ ID NO: 26794 - DNA, 226 bp, Glycine max
  Clone ID: 701097154H1
aactttcttaacgcaacaaacacatagccacatcttctctttctcttcccatggcattctgactcatacccaaatcattgattgtttgtctatcgaatcggtgagaaaatggcagtggagctgatggggttcccccaaatgggcgaacagaaggcaattgaagaagcagccgccgaaggcctcaagggcatggaacacctcctctgtctcctctcccatgaacctt

SEQ ID NO: 26795 - DNA, 256 bp, Glycine max
  Clone ID: 701097155H1
gtgcaatctcctttaatacccttttgttctcaaaacttgctggtgaaaatggaggcatacagaaagagccacagagggtccatgagaggaaaatcgttgcctttttatagaaatgcaccaaaaccagcttcctcaaccgccgtgcaatacacagctacagatattaagccaaatcactattcttcttctcctgcctctgtagggttcgtggtccacgaggactatgcaaccacaaagcgaaatctgaaggttcgca

SEQ ID NO: 26796 - DNA, 258 bp, Glycine max
  Clone ID: 701097156H1
tggagccttcagaagaagcttttgacattaactctgtgcctaaggaggtcaagttccagcctcttgcagaaaagaaagcccctggtaaaaagccaactggtttgggtgctcccccaagtggtcccccatcaactgcagatgcatatgagaggatgctttcaaccattccagagtgtgcaaactttgggaagcttttcaagtcctcagcacctgtggagctcactgaagctgagacagaatatgcagttaatgtcatta

SEQ ID NO: 26797 - DNA, 251 bp, Glycine max
  Clone ID: 701097157H1
cgttgcctccctcgttctctcccttttgatatccaatttcatcatcattcgtcggtaagccctaacaatctatctcttcttcttcgcctgatcctaattttctcgggtttcgtttctaatcccctattttattccccttcgtattttctcgattttatcttgttctttcatctccaatctccgtcagatctctcgcgcgttcttcaattttgaattctcggggattcgttttgttttgggtttagggctct

SEQ ID NO: 26798 - DNA, 255 bp, Glycine max
  Clone ID: 701097159H1
gaaccacgcctcagaagaagaagacccagacgataattcccatgccaaaacattctcaacagccaagaagctcacctcccaaacgccgcactgatttctctttcttcacgcgctccccctcctccttctccaaccctacttctggttcctcaccaggttcatcttctggtgaagtgaggttgtccaatgttgcttcaagcagtttgcaggggaggaaaatggtaatgaaacaattttctgaagatataatggttc

SEQ ID NO: 26799 - DNA, 258 bp, Glycine max
  Clone ID: 701097161H1
acagaacaagatcttgaaggtcatccgtaagaacttggtcaagaagtgccttgagctcttctttgaaattgcagagaacaaggaggattacaacaagttctatgaggctttctctaagaacttaaagcttggtatccatgaggattcccagaacaagggaaagattgctgaattgctcaggtaccactccaccaagagtggtgatgagctgacaagcctcaaggattatgtgaccaggatgaaggaaggtcagagtga

SEQ ID NO: 26800 - DNA, 261 bp, Glycine max
  Clone ID: 701097162H1
tgcgatttgagtgaaggtaaacctgatgctcacaaagagaagggattgaaggaacaagcagaaaggacgagtggaacaatttttttaaagtgtttttggtataaatattgtagtgcattagatttctattgaggagaaatctccgttttggtagtactgatggtattcttttgggggggcagtatctaagtttgtcccgttagggaatagtatatatgccaccataccatgtctttcgttgtcttttaattttgtaatgaa

SEQ ID NO: 26801 - DNA, 267 bp, Glycine max
  Clone ID: 701097163H1
agatgctgataatccaattccaatagatatgatgattgaggagtatgtagcaacagttgataataatgagatggaacagcaggaagtgaaaagcataattgatatagagaataacctacagttgaggagaatatatggaattgatattgactggcctgaacattcattagatgcagtcccccaaattgttgattccaattcaaagttgcggagagtactaagcagctcagccagaattggatttagcagagctgagagtggtttggt

SEQ ID NO: 26802 - DNA, 268 bp, Glycine max
  Clone ID: 701097164H1
cggtgttgaatcatggatcagaaagtcgatttcagtgctccgcattccatgggaaccactatcatcggcgttacttacaacggcggtgtcgttctcggagccgactctcgaaccagcactggagtgtatgttgccaaccgagcatcggacaaaatcacacagctcactgataatgtttacgtgtgtcgctctggatcggctgctgattctcagattgtctctgactatgtgcgctacttccttcaccaacacacgatacaacttggac

SEQ ID NO: 26803 - DNA, 134 bp, Glycine max
  Clone ID: 701097165H1
cggctctgatgctcggtgtcgccgtcgtttgcctccacggcgcgttccgcgtgccggaggatctgttcctcgaccatcaggagaattctcaggctaccggattcctctgcttcctccgcggccctgcctccgcc

SEQ ID NO: 26804 - DNA, 260 bp, Glycine max
  Clone ID: 701097166H1
tggcaggtttgtcattggagggccgcatggcgatgctggtctcatcggccgcaagatcatcatcgacacctatggaggatggggtgcacatggtggtggtgccttctctgggaaggatcctaccaaggttgataggagtggtgcctacattgtgaggcaagctgcaaagagcattgttgcaaatggacttgctaggagggcaattgtgcaagtttcctatgccattggtgtgcctgagcccttgtctgtgtttgttgaca

SEQ ID NO: 26805 - DNA, 257 bp, Glycine max
  Clone ID: 701097167H1
aaaactttcatctttgtcatccacttaacccaggtgtaaaaatgtcagcagtgaacatgtccactatgagacttccaagagcttccttgtctggaacaacaccagctaggagatcatgtgctcttacaaagagtccatcatctttgaggtctgtgaagaatgtgtctaaagtgtttggattgaaatcatcttcctttagagtgtcagcaatggcggtatataaagtgaagctgattggaccggacggtgaagagaat

SEQ ID NO: 26806 - DNA, 96 bp, Glycine max
  Clone ID: 701097168H1
taccgcctcggctagggttcggaaacgaagaagggttctgttttcttttcgcgatgagggccaagtggaataagaagcgtatgaggagtctgaata

SEQ ID NO: 26807 - DNA, 264 bp, Glycine max
  Clone ID: 701097136H1
gaacgaaacacagagggagagagagtgagagaagcagtaattcatcacaatgggtaaggttcacggatctctcgcacgtgcggggaaagtgagaggacaaactcccaaagtggcgaacaagacaagaagaagaagccacgcggacgtgctcacaagagaatgcaatacaaccgccgattcgtcaccgccgtggtgggattcggaaagaagcgtggaccaaattcgtcggagaagtgagggaggcgtttggaagatgatggtttt

SEQ ID NO: 26808 - DNA, 257 bp, Glycine max
  Clone ID: 701097111H1
acagagcgcagaaaataaaataggtgaaatgaatatcgatttcaattccgccactgaatttcgaaaccaaaaaaccattccaacgaagaagatgaacctcgaagaagagggttagttacttctgagtgagtgagtgagttagtggttcctctgaggaacggtgaggaccttcaatttctcaagttctcaaccgttcgttttctctttcgttccgctaaccgccgtggatgggacaatctgtttcctccgccgccgtc

SEQ ID NO: 26809 - DNA, 257 bp, Glycine max
  Clone ID: 701097114H1
cctcgagccgaatcggctcgagccggagatatgtacggacggagtgcttcttacgaatccgaactggcgcttctggattcgactcgccgccacttgctgggagagtccgaattgatattcggagccccgaatttcggttcgggtcggagctccagtttcagcagcttggactcgtgtttgagtgatgattggggagagcttccgtttaaggaggacgattcagaagatatggtgttgtacggcgttctccgtgacgc

SEQ ID NO: 26810 - DNA, 266 bp, Glycine max
  Clone ID: 701097115H1
cctcgctctatttctcagtctctgtgtttgcggctgaggattccgaacgagtgaccttcttcgtttctcgcaaagtttaagtaatcatgggtaaggaaaaggttcacatcaacattgtcgtcattggacatgtcgactctgggaagtcaactaccactggtcacttgatctacaagcttggaggtattgacaagcgtgtgattgagaggttcgagaaggaggctgccgagatgaacaagaggtcattcaagtatgcctgggtgctc

SEQ ID NO: 26811 - DNA, 270 bp, Glycine max
  Clone ID: 701097116H1
cagagctttcagtgccagagctcgtctccaaagaaggaggtcctgaaacatttcgtggaatttttattcgtgcccctgcaattcttgaagcagggccagaagttcaagtgctggctgattatcttgtaccttctagcagattgttgagttccgattcctctattgaagacaaaatggagaatgctgaggaagaaagtaaagttatagttgctgtgagacaagggcacatattagcgactgctttccatcctgaattgacagctgatactc

SEQ ID NO: 26812 - DNA, 272 bp, Glycine max
  Clone ID: 701097117H1
tccggccaactggatcaccagctcttcccgcccaaccacaccggtttcctcttttcacggtttgaaactctccaaaagtagcagcaaatcatccaagcaaacctgctcaatatgcttaaccaaaatgaagcaaggatctggccatgctatattcactgcagaatgttcacattcattccatttccagtgcattgcttcaaatgtgaaacattgaaaccaaatatgtccagtgtgcagagcaaagtggaaagaaataccttgtcaggtcccag

SEQ ID NO: 26813 - DNA, 268 bp, Glycine max
  Clone ID: 701097118H1
atctattcttacaagttacatccattgagaaacatgaaggtctcccccttagcattttcaatcctttttttgtccttcaccatagaactcttcattggcattgcttcagcagcacaagaaccagtgcttgacacctcaggccagaagctgagaacaggtgtcaagtactacattctaccagtcttcagaggcagaggtggaggcctaacagtttcaagcagtggcaacaacacatgccccctctttgtggtgcaagagaagcttgaat

SEQ ID NO: 26814 - DNA, 265 bp, Glycine max
  Clone ID: 701097119H1
gctttgaaacccggttcatccgaagcccttcaccgaaccatgtcgaggagaaaggttagagagccaaaggaggaaaatgtgactctgggtccagctgttagagatggtgaacacgtttttggcgttgctcgcatctttgcctccttcaacgacaccttcatccatgtcactgatttgtctggcagggaaacccttgtccgaatcactggtggtatgaaagttaaagctgacagagatgaatcatctccttatgctgctatgcttg

SEQ ID NO: 26815 - DNA, 240 bp, Glycine max
  Clone ID: 701097120H1
gaagagtgagtttgagggtgtttctgggatccctaatgttgtaggctctatgtacacctctcatgtgcctattatagctcctaagattagtgtggctgcttatttcaacaagaggcacactgagaggaaccagaagacttcttatagtattactgttcaaggggtggtggatcatagaggggtgttcactgatgtgtgcattggttggcctggttcaatgcctgatgatcaggtgttgga

SEQ ID NO: 26816 - DNA, 261 bp, Glycine max
  Clone ID: 701097121H1
ctcgtcttcaatcctttcgttattctcttattcatccttctcttctgaataatccagatctctttctgcccttttctccgtcacgcttttcgtgaccggatctgtatggatttgatccagatctacacgccgatggtggttttggccgggtctttcatagatctggtgcgtagaggctcagatctacggtaccgaggtgtgtgattcatgttcgtcttgcttttggaatctgtttcgtagaaagtcgtttggtcttgcata

SEQ ID NO: 26817 - DNA, 258 bp, Glycine max
  Clone ID: 701097122H1
ggaatagttagcgaacaaacccaacaatcttacaatcctaaaagaaaacggaaagcaaaataaacaaacaattcaagaagagaaagattatgggtatcgtggaagaggctcacaacgtgagaatagtagggaaggggaatgaaatcgtgattcttgctcatgggttcggcacggaccaatcggtgtggaagcaccttgtaccgcatctggtcgatgattaccaagtgatcttgtacgacaacagggtgctggtaccac

SEQ ID NO: 26818 - DNA, 257 bp, Glycine max
  Clone ID: 701097123H1
gctatcactaaatctcattcttcatctgcagctatttggattgctgattattgttaactgatattggtgcttttctttgagaaagtgtgtacactttttggataagagaaaacaagagaggtgacattggaagctaactcagagagaggcaaagatgttgggaattttcaagcagaagttggttaatgcacccaaggagctgaacagtccagcttctttgaattcatgcattaagcctaagctaagtcatgaaatcc

SEQ ID NO: 26819 - DNA, 258 bp, Glycine max
  Clone ID: 701097124H1
ctttggaaactgcttaactctctgttatgcaatgcttaagagagaagacctcaagggagagagtggttttgtgaatgcggtcaaggtcattgaaagggcagtggctgatatgaaaagtgaactcttcaaagatgcagaaaattggagggaatcttttacgaagatgtttgtgttgggaagcactttgatagttacagggtcaccaaaattcactgtttatgagactgattttggatttggaaggcctaccaaagtgga

SEQ ID NO: 26820 - DNA, 253 bp, Glycine max
  Clone ID: 701097125H1
ctcgagccgcaaagtttcagtttttggtgttccatttttcttcctccatctttatcttaaacataacttgaactctccattccttaaattttagctacgagctagttccgacacagacaaagcaatggcaaagaccgagttagaggtgactgttgagagcaagaacaaagacctcaagcacctggggtttgtgaggattgctgctattcaaacatttgtgattgtgtcaaatctgtatgagtacgcaaagcag

SEQ ID NO: 26821 - DNA, 254 bp, Glycine max
  Clone ID: 701097126H1
ccaaatgggttgatgaagtggcaccggatctggcctggatgacccagagatcaagctgggtcggatacgtggctgtttacgaggatagaagagaaatagcacggatgggaagaagagacattataatctctcttcgtggaacttccacgtgtatggaatgggcggagaatctcagggcccatatggtggaaatgggagacgaagaagcaaaagccaaagtagagtgcgggttcatgagcttgtacaacacaaaa

SEQ ID NO: 26822 - DNA, 253 bp, Glycine max
  Clone ID: 701097127H1
gagagaagaagaaacttaatcgatcatcacttcacttcactaatacatcatggcagacgagacccagaacaagtatgagagctctgaggttgaggtccaggatcgtggtgtttttgactttctcggtaagaaaaaggatgaagaagacaagcctcatcctcaggaggaggtcatcgccaccgagtttcaaaaagtcactgtctcagaccaaggagagaacaagcacagcctcttagaaaagttcaccgatctg

SEQ ID NO: 26823 - DNA, 257 bp, Glycine max
  Clone ID: 701097128H1
ctcgagccgcagcactactctctgatcagttttttcttggtctccgaatcacaaactcttcgaaaaaactaacattaatggctccgagggatatcaatagatctaacgttgttgttgccggaggatccaacccgacccgtaaagagatccgataccgcggcgtgaggaagcggccgtggggccgtacgccgccgagatccgcgatcccggcaagaagacgcgcgtctggctaggaacgttcgacaccgcggaggagg

SEQ ID NO: 26824 - DNA, 257 bp, Glycine max
  Clone ID: 701097129H1
agagcagagagtagtaagaagacactgcacagatctgagtggtgactgaaggaatctagcttctttcatttctcatcactattcttaggtctgagggctcattgccattatcatgtcaaggaggccagtaaatccttcgcgtcggttaggtgatggtggaagtataccatttgctgcatctatccggtctaaatctcaaaactctcccctactatctattgggcttgtcattgtgggtgcaatccttctgattggtt

SEQ ID NO: 26825 - DNA, 263 bp, Glycine max
  Clone ID: 701097130H1
atcctggaacgcaaaggaggattgctgcgagtggttctgctgcgttaagtgtgacgagaaaacaaaccgcgtcattagcgttgccttatcatccccttttccagacaccaatctctcggcccaaatacctccctctgtgggtgacctcccttacctcgagtccctcgtcttccacaaattccccaaactcgtgggcccaatccagcccgcaatcgccaaactcaccaaactcaagtaccttgatctctccaacaacaatctct

SEQ ID NO: 26826 - DNA, 266 bp, Glycine max
  Clone ID: 701097131H1
gaacttgacagggaccaataatttgagttttgttggtggtgacatgttcaactctatccctcaagctgatgcagtgctactaaagtgggttttacataattggaccgacgaaaattgcataaagatcctgcaaaagtgtagagattctatttcaagcaaaggcaacagtggaaaagtgattatcatagatgccgtaataaatgagaagctagatgacccggatatgacacaaacaaagcttagtttggacattattatgttgacga

SEQ ID NO: 26827 - DNA, 266 bp, Glycine max
  Clone ID: 701097132H1
cggatgggctattaacaggacctaatgagcaaattttggttcttgcagcaaccaacaggccatttgaccttgatgaagctatcataagacggtttgagagaaggatcttggttggtcttccatctgttgagaacagggaaatgatcttgaagactcttttggctaaagaaaaacatgaaaatttagacttcaaagagctggcaaccatgacagaaggatatactggaagtgatctaaagaatttgtgcatcactgcggcttatcga

SEQ ID NO: 26828 - DNA, 268 bp, Glycine max
  Clone ID: 701097133H1
ggaactcagctttacgtgttctctctctagactctgctctcaaacgccgtcgttttggaactctttttcttttccctttgattcttctctgtctttgtaaccgaaagaggggaaaatataattaataccgatttcgcaaccaattcttctcttgcgttgaattgggacaacgagaaattttggatctcagtttttggcaggaaaaaaaaattgcatttgagtaaaaataacagagtgtagtgtagggtcttgttcttgatactgtgct

SEQ ID NO: 26829 - DNA, 264 bp, Glycine max
  Clone ID: 701097134H1
ctcgagccgctttctttcttgtaacttcaacaaacggcagcttcttcaattcaaaacagaactctcttgggtgttggtgttggtgagggatctgaggcaaaggtgttgatgatatgggagcgtgtgtttcaactccacaagggttcgtgggatggaggttgagctcttccaagaagaaaaccagaaagagaaggagagagggactcagaagaagagttacttctcggttgtgtaaggactcatcggagaaagttgatgtggcag

SEQ ID NO: 26830 - DNA, 257 bp, Glycine max
  Clone ID: 701097135H1
ctcgagccggagagagatggaggagaagacggagaaggtgaagtctgaggcagttcagataattgaagcgtttgaggttctgccaaagctcgtggttttcgatctcgattacactctctggcctttctactgtgagtgtcgatcgaagcgcgagattccttctctgtatccccacgccaaaggcatattgttagctctcaaagagaaaggcatcgacattgccatcgcttctcgctcgccaacggcagacatcgcaa

SEQ ID NO: 26831 - DNA, 255 bp, Glycine max
  Clone ID: 701097110H1
ggctagggttagtgctttgtttcactctttgctcttgatttcttcccttgtattggcttctcaaatccatgtttcctctgggaaactagtccctggactatcatggaattactatttgttgacatgtcccaagcttgagaggattataaggaagcatcttgaggatgtcttcgagaaggacagtggagtagctcctggcatacttcgactcttcttccatgactgctttcctaatggatgcgatgcgtctatatt

SEQ ID NO: 26832 - DNA, 276 bp, Glycine max
  Clone ID: 701097081H1
tctcgagccgtttttctctcacccccaatcccaaacccaaaccctagctagcttcaccatgcggttccaatcgctctaaccctatctccttttctccaccaacgatcttcgatccgcatcgccgttcattcgaatcgtctcagattctccgctgcttccaccaccaccacaaggaggaggagttcctcgcgattcgcgcttgaagcttttccgtcgccgccgacgatcgaagaattcgctccgattcccaacgcgccgtcgtcgaggttttcaccg

SEQ ID NO: 26833 - DNA, 277 bp, Glycine max
  Clone ID: 701097082H1
aaaggagtgatttggagtttggagcgactgaactaatcattaatttgcactcgctgtttcagcttcatcacccttcttttgcatcatttatatctcttgagaaatggcacaagaaacctttctattcacatctgaatctgtaaacgagggtcaccccgacatgctgtgcgaccagatctctgatgcagtacttgatgcgtgccttgaacaggaccctgacagcaaggttcctgtgagacatgcaccaagactaacatggtcatggtcttcggagaga

SEQ ID NO: 26834 - DNA, 273 bp, Glycine max
  Clone ID: 701097083H1
caccactttcataatggcactgttgaatcccctccagaagaacccttttaccctatggcctcacttgtgtatttccaattcacttttgctgctattacccttattttgttggctggctctgtcctcggccgaatgaacatcaaggcttggatggcttttgtgcctctttggttgatcttttcctacactgttggggcttttagtctttggggtggtggctttctctacaatggggggttattgactattctggcggctatgtcatccaccttt

SEQ ID NO: 26835 - DNA, 275 bp, Glycine max
  Clone ID: 701097084H1
gacctataagaggattttctcacatatcaaattcatattaggctactaggtactagtagctcacaaaaccacgaccaacaaagtcgttataagaattttcagtttactgttataccaaggctagctatcagagccttgttcctttaggccttaggtgcttaatctagccaattttaagcataattagtttaggatcggaaaatgaaaataaatgttattaaatagtatagcattttttttataaagaatatcatatttaatattctcaatatatt

SEQ ID NO: 26836 - DNA, 276 bp, Glycine max
  Clone ID: 701097085H1
cttcagcttatttacttggacatgcaaactaagaaaaaaacctccaggcgaaatgccagtcaagagcgtggcagtcctaaagtttcaagagcacagaggaaggtctctcaaaatggtcaagctgctgaaaagaaagtcacagacttaattacatcatctgctagaaagaataaatctcttagcacccttgagaataaaactagagagcctatccctccaacagattgaataatggatatgagtttatggacagtgggacttctgatgcttgtttgg

SEQ ID NO: 26837 - DNA, 274 bp, Glycine max
  Clone ID: 701097086H1
cttaccagtatggctatccaacaatctctgttagacaggcctagacaatctgtttccaaaactatctgcttaatcttttctatagctgctgtcatgatctcatcagcctttgttggttcttatctcatcaaatccacctccttcttcaaccaatcctctcctcaacatctctgtgatcatgcacttgatagggcaacatgtttaacccatgtctcagaagtggtcaaggtccgatcttgacccccacaaaagaccacaaattcaatttgttaca

SEQ ID NO: 26838 - DNA, 272 bp, Glycine max
  Clone ID: 701097087H1
agggaaaaacacaagacggcgcacatagattttgtcgaagaaacatccgaggaacaaggttctgtgcagagcgggactgtgattcaacgcgtgtcttctgaaactggataattttggaacagggagtagaatgtcttgcgccaccttcaatgttgcagcttctttgaatcttcatggacgtactaagcaagcagtttctaagccatttgggtcaagaaatcactgactttccctaagttttcttttctctattctgagaccttgaatttgag

SEQ ID NO: 26839 - DNA, 270 bp, Glycine max
  Clone ID: 701097088H1
ctcccattttcgaatttaaagcgttcaggtttggttaagaatcggcttattgctcgttgcacttctatgtccgatgaatttggttctgttaatgggttgcaattctcgcccaataagctttttgtggaggaggctattggggctgaatatggggaaggctttgagacttttagggcagatggaccactaaaagttgatgtggactatttgaatgagaaattgcaaatggttttcttcagcgcatacgctatgctatgaaaccagatgaag

SEQ ID NO: 26840 - DNA, 274 bp, Glycine max
  Clone ID: 701097089H1
ctcctgttgtaagcagccacatatctactgctgttgccacttcaacccctgttgggagtgtgcccataactactgttgaaaaatcagttttgtctgtacctccgctatctcttgctgatcacctcaaaagtgagtggaatgttgagaagaggattctgtcagataagtctcttacaaaaattaaggttgcaagggtaaatgcagaggaagcttcagctctttctgtgctgctgtgaatcatagcctggagatttggatacagttggataagcaa

SEQ ID NO: 26841 - DNA, 275 bp, Glycine max
  Clone ID: 701097090H1
agctaccttgctagtttccatcatcgtatctgttagtatttccaaatatacacattttctattttattcatagaaatctttaacttgagaagcattacatggcgctgacgatgatggcggcgatcggcatcggcatgaagcaagagaagaagatgccggcgacgccgggccggagaacgagctgaagaagcggaatgacgagctcgagaaggagctcagagagagaaggagagggaggagcagatgaagcgcgaactccagagcgcgtgggagag

SEQ ID NO: 26842 - DNA, 275 bp, Glycine max
  Clone ID: 701097091H1
gtgaataccctaattcggagggtttcagttttcgccctcttttctcatctccaacatcttcgtcgtcacggaggctagtcttcctgttatcacaaacaatgtctgacggtcaagaatcagacaagaatattgagatatggaagatcaagaaattgataaaggcattggaagctgctcgaggtaatggtaccagcatgatttctctgataatgcctccacgtgatcagattctcgggtcactaagatgttgggagatgaatttggaactgcttcaa

SEQ ID NO: 26843 - DNA, 277 bp, Glycine max
  Clone ID: 701097092H1
aaaagaatcttgggagatcagggaggtcatcgtcgtcatttctgcgctcaagattaacataacgacctcgcgcacccaggaacagggtattgtgttgtgtagctgaaggacatggagagaagcaatccggtgaggaagccacacacttcaactgcagatctgcttacgtggcctgaaactcccatttctgattccccagctcctccttcctccgccgttcgttctcaccaccgtcggatgggatcaggaaggtggtgtttggtggtcaggtcaccga

SEQ ID NO: 26844 - DNA, 277 bp, Glycine max
  Clone ID: 701097093H1
gtttccctttccaccaccccttttcttcccttcactgcaaaaaatgcttctactagaatccctcctcccacatcattctcttacagcaagcaacgtagtaacagggatcccaggaaggttgtctgcgcctgcatcgctcctcctcaaaacttcaagagccaggactcttccgccattcatttcaatggttcgtccaaatcagagcaattgagcactgcgcgggatcatgagatgattctgatgttcttattgagtgtagagacgtgtacaagttttt

SEQ ID NO: 26845 - DNA, 270 bp, Glycine max
  Clone ID: 701097094H1
ctctctctctctcttcttcttcttcttcttcttgcacgtattgttctaatccacaaaaataatggccttaaattacaacattgccctcgccttctctacggttctcacgctgcttctccttcccttaccaacccttggggagctcgtgcaggagcagccactagtcctcaagtaccacaacggccaactcctgaaggggcgcatcaccgtcaatctcatctggtacggcacttcaccccgatccaacggtccataatcgtggacttcata

SEQ ID NO: 26846 - DNA, 239 bp, Glycine max
  Clone ID: 701097095H1
aaagtgtcttctcagaatggaacaagggagaacttctgagtttcctgattgaaatcactgcagatatatttggaattaaggatgataagggagatggatatcttgttgacaagcgtcctagacaagactggcatgaagggcactggtaagtggactgttcagcaagctgctgaattatcaattgctgctcccactattgaagcatcattggatgcaagggtcctgagtggggtgaagga

SEQ ID NO: 26847 - DNA, 272 bp, Glycine max
  Clone ID: 701097101H1
cttgtggaagtcaggggaagctcactattactgatgatgatgtgatagagaagagtaacctaagcagacagttccttttccgtgattggaatattggacaggccaagtccacagttgctgcttcagctgctgcagctataaatcctagttttaatattgaagctctacaaaatcgagttggtactgaaactgagaatgtgtttaatgataccttctgggaaaacttgagtgtcgttgtaaatgcactggacaatgttaatgcaagactatat

SEQ ID NO: 26848 - DNA, 264 bp, Glycine max
  Clone ID: 701097103H1
cacaaatgataatcatctctactgaccaaatctgaagaaaattgctttctctttggttcctagctcgcactctctctacgcacgcctcaacatcccttctctgctccattcattatgtctccgtcgttggatcttccccccaagggtggcttcagttttgatctatgccgaagaaacgcaatgcttcaaaacaagggcctcaaagccccaacctttctcaaaactggcaccactattgtcggtttagttttccaggatggtgtc

SEQ ID NO: 26849 - DNA, 214 bp, Glycine max
  Clone ID: 701097105H1
cagaactcgttccccgcctcatccggttccttcaaaaccgaactcgtcgaaccggttatcaaacccatgctcgacctgctccgccaaaccggttcctacttaatggtgaatgcgtatccgtttttcgcttacgctgcaaactctgataaaatctctttagactacgcgctattcaaggaaaaccccggcgtggttgattccggtaatggtttaa

SEQ ID NO: 26850 - DNA, 261 bp, Glycine max
  Clone ID: 701097106H1
gaaaagtaaagtttctggcagagggaaactggggcattcgcaaggtttatggagcagtgccacatgatttggggacacatgatccatggcatgaaatgaatgcctataacatccatgatactagcaagtggaaggacctgaacccaaaatttgttcttcaggtgtatcgagattttgctaccacaggtgatttggaatttggagtggatgtgtggcctgctgtccgtgctgcaatggagtacatggaacaatttgatagag

SEQ ID NO: 26851 - DNA, 259 bp, Glycine max
  Clone ID: 701097107H1
cagagccagcgagagcaaaaccctagttcatccatcaccagtcgaggaagaagatggtgaagttccttaagcccaacaaggctgtcatcgtcctgcagggccgctacgccgggcgcaaggcggtgatcgtgaggaccttcgacgagggaaccagggagcgcccctacggccactgcctcgtcgccggaatcaagaagtaccccagcaaggtcatcaagaaggactccgccaagaagacggccaagaaatctagggttaa

SEQ ID NO: 26852 - DNA, 250 bp, Glycine max
  Clone ID: 701097108H1
actcgagccgaatcggctcgaggttggtcataggagaacaccttggctggttagattccatcaattgcatccacatatacttactagtgggagcttggatcaagaagttcgtttatgggatgctaacacatcagagtgcataatatctcatcatttctaccgtcccattgcatctattgcttttcatgccaaaggtgaaataattgctgttgcatctggccacaagttgtacatatggttccacaacaag

SEQ ID NO: 26853 - DNA, 259 bp, Glycine max
  Clone ID: 701097109H1
cctcgatccgaatcggcccgatagctacaggtctccttcctccgtccaccatcgcacccagttctagcttcatagcagcaccgcaccgcaccgcaccaggtcttctttttttctttcctggcggaggaaattacttctcaattaaaaaaaaatttgctggatgaagaaaatggaacatcaagtcatgttgtagaaggggctgctgatgctgatgctgatgctgagctttctccaccatcacataaaggcgatgacgcta

SEQ ID NO: 26854 - DNA, 266 bp, Glycine max
  Clone ID: 701097079H1
cagcaatagcttctggtgatctcgttttcttacagtgctctcttccccctttctctctcctctttatctctctcttccattgctcctccacaagcaacgccgcgcgacgtcaattttcgcaatcgccatgactgtgatgactcctgctcccattgaccagcagcaggaggacgaggagatgcttgtcccgcacacggatttggctgaagataatcaccaacctatggaagttgggctcaactgatgctgccacactgtggagagtc

SEQ ID NO: 26855 - DNA, 275 bp, Glycine max
  Clone ID: 701097054H1
cctcgagccgattcggctcgaggcttcggctatcagaaactgtgatcctgagggtcctctgatgctctatgtctcaaagatgcttccagcatctgacaagggcagattttttgcttttggtcgtgtattctctggcagagtttcaactggtttgaaggtgaggattatgggaccaaattatgtccctggggagaagaaggatttgtatgttaaaagtgttcaaagaatgtcatttggatgggaaaaagacaggaaactgtggaagatgtcccctg

SEQ ID NO: 26856 - DNA, 276 bp, Glycine max
  Clone ID: 701097055H1
caaaacccgcggcaccatctcattttcatttcccgcccaacatggcagacaacaaaaagcgccggcgaaaggaccccgccggcgacgagctccccttcaaaaacaagctgaaaccggactccgcaatcatggaaaccctaaagcagttctccgcctcatcctcctcctcctccgcctccgtctcacaaaccctaacccaccaggacctctccctccccttccgctgccgcaggtggcggacctctccctctcctccgtgcagtccaacatcgagtc

SEQ ID NO: 26857 - DNA, 279 bp, Glycine max
  Clone ID: 701097056H1
ggccgaaccgggcggctggcaccggttactggaaggcaaccggggcggataagcccaacggtcagcccaaaccggttgggattaaaaaagctttggtgttttacgcagggaaagctcctaaagcggacaaaagcaattggatcatgcacgagtatcgtctcgcagacgtagatcgctccgttcgcaaaaagaacaccctaaggttggatgattgggtgctttgccgtattacaacaagaagggcacgatcgagaaactgcaaccaagcagcgatgttgc

SEQ ID NO: 26858 - DNA, 269 bp, Glycine max
  Clone ID: 701097057H1
acaaagagaagggaaatatcaggaggtgcgagtaccggagccaaacgcgggtgtgtgtgtgtgtgagggagagagagatgcagttccattcagaaactccaaactaaacatccctggcgacaaccttaggaatctcgatcgctgaaaaaacctatgcagccccgaacacactctctgcattccaacttgtttaagtcatgcctttcgattcacccttctctcaataaattttaatcagattcttggccaccgccacactcataataaag

SEQ ID NO: 26859 - DNA, 273 bp, Glycine max
  Clone ID: 701097059H1
aatagtggtgtatttggttcatcatctgggggtgctcttagacccccaaatcgattgaataatcaaatgggtgttgctgagaaccagaaccagaaaccctatggtatgccaccctcacaccctaataccaatatttcaccttcatcaccttatcctcaatttttgggctcccaatcccaatccaattctgtttcccagcgtttgggttctcccaatttgagtcctgcgtcgcccattccaggtctttgtctcagcctcttttttctctctgga

SEQ ID NO: 26860 - DNA, 271 bp, Glycine max
  Clone ID: 701097060H1
tctcgagccgattcggctcgagcaaaggtgtatttccagtgcttgactatcccttggtaataacattctgccgtctatcggttcgcatggttgggatgcctctctttcagttttgtgtgcttctgtgccaagagattccatgtctggttcacaaatctccataattcaatacgcgatgaccggtatctgattggccggaggttgcataactttggagaacatgctgagaaagcaatgtagcagaaacttctacaggggagcaggaagctat

SEQ ID NO: 26861 - DNA, 279 bp, Glycine max
  Clone ID: 701097061H1
gggagttccattgactgccgaagagttagaagaaaaggagcagttgctagaggagggattttcatcatggagccggaaggattttaatgctttcattagggcctgtgaaaagtatggccgaaatgatataaaaggtattgcttctgagatggaaggaaaaacacaagaggaagttgaaagatatgcaaaagtcttcaaagaaagatacaaggaattaaatgattatgatagaatattaaaaacattgaaagaggggaggcagaatatcccggaagatga

SEQ ID NO: 26862 - DNA, 281 bp, Glycine max
  unsure at all n locations
  Clone ID: 701097062H1
caattatacaaacacatattcattctcctcacataccaaaaataaattatttttcttgttattttccctttgctaacggaaagccatgaaattcgggaagagcctgagcagccagatcgagaaaaccctgccagagtggcgcgacaagttcctctcctacaaggagctcaagaagaagctcaagcagttcgaccctcncgcccccgcctccgccgccgatgaacgcccggcaacgcctcaagaccgacgccggcaacgcgacgccgacgccgtttccgacg

SEQ ID NO: 26863 - DNA, 282 bp, Glycine max
  unsure at all n locations
  Clone ID: 701097063H1
ggcgtcggcctcaacgccaagcccgatctcaccatcgaaacctgggcccacgaaaaagccctcgagcgcctcaagatcgaaaactccctcgccgccgccgcaaccaataacaacagcgagtcgtcgtcctacgacgaatcggactgagtcgactcggatccgtccatgttaggttttgttanaggaaaaacaaaaaagggttcttcgctgtaataagggtatacaactcttggaattgaactccttggttactctaatttttctcctgtgttttgaattttg

SEQ ID NO: 26864 - DNA, 233 bp, Glycine max
  Clone ID: 701097064H1
ggaagaagtctcaggtcttgagcagtttagagctgcaatttctttaccaggtgtatctgttgtccattttgaagttgcatctaacttgcaatgcaaacaaatatggccatttgtcaatacactatgtggtcgatatccatctattaacttcctcaaggtggacattcagcaaagcccaacagttgcaactgcagagaacgttccgattgtaccgaccctccagatataccaaa

SEQ ID NO: 26865 - DNA, 282 bp, Glycine max
  Clone ID: 701097065H1
ttccttctctctcctcatttccaaagttcccaactttactaacccgagctgcaacgaatgccgctgatattagcgaaaagcgattcgatccagattcgcgaggtgtggaacgataacctggaagaggagttcgcgttgattcgcgaaattgtggacaactacccttacatcgccatggacacggagtttccggggatcgttctccgaccagtggggaatttcaaaaacagctagattaccattaccaaaccctataggacaacgtcgacatgctcaaactca

SEQ ID NO: 26866 - DNA, 278 bp, Glycine max
  unsure at all n locations
  Clone ID: 701097066H1
tttcactttccatcactttctctcgtctccccttcgcaattccccctctcgaaagacacacgcatcgcagaccatcacatcacggccatggacgccccccccgccccattcatcgattccttacactttgaatcttacggcgncttctacggcgccgaccacggctggcagaaggtgacctacgctaagaaacagaagaacaagactgttaacgccgctaacggcggccccattcccgcgccaattccagcaagctcgttccgaacggcacgctgtcc

SEQ ID NO: 26867 - DNA, 279 bp, Glycine max
  Clone ID: 701097067H1
ctaggtcaaaagggactacatgtgtctgtactgcaatgatcgatgttatccattcagcagcttggaagcagtcaggaaacatatggaggcaaaaagtcactgtaaagtgcattatggtgatggtgatgatgacgaggaggtagaattagatgagttctatgattatagcagcagttatgtggatgatcaaggcaagcagcttgttgcatcttgtgatgcatctaacaagtagaacttgctggtgggtccgagctcataatcaccacgaaatctggtgat

SEQ ID NO: 26868 - DNA, 265 bp, Glycine max
  Clone ID: 701097068H1
ctttcacaaagaaaaaataaaatagaagaagaaacaccaaacgacgccgtttaaactgcgatctctctacgtccttccttttccttctctcgcgcgattatcgctgtttttcccgaacaagagagcatggccgtagctgatcccaagcctcactccgaacctaaggtctggaacttcttcaagcttccgttccgccattccgccgccaccaatacgacgccgtcttccgtaaccttcaccatcttcatcatcaccataaccacca

SEQ ID NO: 26869 - DNA, 273 bp, Glycine max
  Clone ID: 701097069H1
ctcgagccgtcttactctagactcttccttttctcttctctgtctaaggggtgccctgagatcacattgaacaatggtgaaggctgtggccgttcttggcagcagtgagggtgtcactggaactattcacttcgttcaggagggaagtggtccaaccaccgtaactggatctcttgctggtcttaagcctggtctccatggtttccatgtccatgccttgggggcactaccaatggttgcctctcaactggatcacatttcaatcctaataac

SEQ ID NO: 26870 - DNA, 265 bp, Glycine max
  Clone ID: 701097070H1
cttcattcataccccttatcaaatctccacacatatatattatttccaccgatctctctgtcattctccctcgcgttctcattgtctctagacgaagcgttcgcaaaaacaagttcgttgatttcgttggtgagtatcaccttgatcttatagtagggtatggcgcggtgcccgtgattgttcctcgtgtttccggggtgcacatgttgttggatagctttgagcaatccacggcgtgcttctgtgtgaaggagaagacattgat

SEQ ID NO: 26871 - DNA, 268 bp, Glycine max
  Clone ID: 701097071H1
tgctgattgccttgttgggtggtgcacaagctgttgtgttatgtaacatcgactcaagtcaactaaacttgtgtcgtgctgcagttactggtcaaaaccctccaccaccagatgagaaatgttgtgcagttattcgccaagccaatttaccttgcctctgcagatacaagtctattcttcctttaattggaataaaacccgaaaaggctttggccttgcctggtaatgtggtctccaatcccctcctaattgttgagtgtagtgaagc

SEQ ID NO: 26872 - DNA, 274 bp, Glycine max
  Clone ID: 701097072H1
actacctccaggaccaaggaaactacccttcattggcaacctccaccagcttggtacgttgccacatcaatcccttcaatacctttcaaataagcatggacctctcatgttcttgcagctgggttcaatacccaccttggtagtttcctctgctgagatggccagagagattttcaaaaaccatgactcagttttctctggcaggccttcgctatacgctgcaaacgtttcggatacggttcaaccgtgagttttgcaccgtacggtgagtact

SEQ ID NO: 26873 - DNA, 274 bp, Glycine max
  Clone ID: 701097074H1
tagcagcatccatataccgacctgtgcttcagttcacggataaagttgcttcaatgctgccaacaaagtattcccaactcggcaatgatgggttgctagcttttgtggagaactttgtgaaggaccactttttaccaactatgtttgtagactaccgaaaaggcgtacagcaagccatatcgagtccagctgcatttcgtccaagggcacatgttgctactacttcacttcatcaattgagaagggtcgacctgttttacaaggattattagct

SEQ ID NO: 26874 - DNA, 275 bp, Glycine max
  Clone ID: 701097075H1
ctgttctgcatcatcatcattttcttcaataactatagttagttccctttgatatttgatctgggtcaccttctttttttcttctgggaccagttttcacccatcccattttgcactgcttgctttgtgtctgtgacttggtctcaccaaaacctcagaattcaagagaatttcgaaatttggtggtgcctagtttgttcattttggatgtaagtaaaacaaccactcatcgacactttgcttttggttaattggttttgaggtcatttgtattg

SEQ ID NO: 26875 - DNA, 280 bp, Glycine max
  Clone ID: 701097077H1
gctaatgataattttacttttgtgcataaaaactcattggtgccaccttcaaaagcagtcaaccaacgtgatgcagatctcatccatttctgggataagttccgcaaagctcctgtgggttcttctaggaaagctgcagctgagaaagaaattctggaagcaatgtctcacagaatgcatatagatgacaacatgaaacttattggaaagctcttatttggcattgaaaaggtccagaactgcttagcagtgttagacctgctgggcaaccatttgttga

SEQ ID NO: 26876 - DNA, 274 bp, Glycine max
  Clone ID: 701097078H1
gcttatggggccaaatgctttgcttactgcaggcaacacattgatagctagcatagctcattcacggaaaggccggtggaggaaccgtgtaattacttgttaacaccatatcttaaagagacacagttggtgtatcttgtcttgttgaattgaaaactgtgctatagacacccttaaaaaaggaattgcttgaaatgagcatgactttttcttatctgcttctggggtgaaagtctgtatataatatagactttcatagacaattgatttgcgg

SEQ ID NO: 26877 - DNA, 273 bp, Glycine max
  Clone ID: 701097053H1
taggctcttccgtcttcaaacattttaaattttaaattaaccatttgggttgtgaatacggttttgctttttgtcttggttgttcatgagtatgaacacccattgtttagggggggtgtaatgtaattaacaactatagaggaacatagtactcttcttctcacattttgcaaccaacccatctaacgtttttttttcgatccttaaacatggttttttggctagcgacatctacttgtgctcatgttagatgctaatccttcacggtggtga

SEQ ID NO: 26878 - DNA, 279 bp, Glycine max
  Clone ID: 701097025H1
aattaataacaagctagctattagttcgattttgtagtaagtgaggtgccaatatggtgaagatagctcttggtactttggatgactcttttagcgctgcctctcttaaggcttatttcgcagagttccacgcaactctgattttccgtgttcgctggtgttggatcagccatcgcttacaacgagcttacaaaagatgcagccttggatccaacggggctggtggcagtactgtggcacatgcatttgcactgtttgtaggtgtctccgtcgccgcca

SEQ ID NO: 26879 - DNA, 282 bp, Glycine max
  Clone ID: 701097026H1
accctacttgtgttcttgattatactctgcgaaataatttttgcgtttcattgtcttataattagcatggcctttgccgcagttaaagtgttcatgatattggggcttttagccaccgcgtgtgtagcacaagcccctggacctgcacccacgcaaccaccatcaacaaccccatcaccgtccacgtcagcacccgccccatcaccaaccgcaaacacccctcctcctgcggtgcacctgcacccgcaacacccacacccacacccgctccttcatctccaa

SEQ ID NO: 26880 - DNA, 90 bp, Glycine max
  Clone ID: 701097027H1
gttaatgacgggctgagttgatttaaaacgccatggaacaatttcagtgttatacatatgcacattattttctcgcattaagatcgtcat

SEQ ID NO: 26881 - DNA, 284 bp, Glycine max
  Clone ID: 701097028H1
gtttttgggttgctgtggagaaggcttctttacgcttcttaccaaccaatgagttggaggctacattaactcacactacaaagtgcccttcaaaatctttagcaggagcttttagaaaaaagatccagaagtggctgtttcaaaattcctgggtaggcagaaccttattttgtttctggatgatgagcagcatctctttttttgttcaatttttccaccttcttccaaccctaatattctttcccctttttctgtatcttcttactagaaagagaggtgcagtc

SEQ ID NO: 26882 - DNA, 226 bp, Glycine max
  Clone ID: 701097029H1
gaagactgaatctatcagaatatccactggattcttcgctctttgcctatgtttctccccagtctattaactccaagcttcttcacacgtctcagttcaggttcctagacaaagctgcaattataaccccacaagacggcataaacccagacgggtctgcatcagatccttggagtctttgcagcatgcaacaagtggaagagctaaaatgcttgctgagagtgat

SEQ ID NO: 26883 - DNA, 284 bp, Glycine max
  Clone ID: 701097030H1
aaggaacatgatttagaaaactgccaagcccacccatattcattctctcaaaacttccaaccatgaactgaagcaccacacatacccacttcctccaaagacatcatttttattaccaatcttccaatttcagagaaaattctttgtgggcatctcttaattaaaaaaatgtcaagcttccccaacacggtggcggaagggcgcaggtccagcaaggcaccggaaaaatccacttttttcagacttgcagcctcttgagccagttcttgaaggagaaacgtgct

SEQ ID NO: 26884 - DNA, 283 bp, Glycine max
  Clone ID: 701097031H1
aaaaccttgatcaagaattgaagcattaatcttcaaccatggccacacccttggcctaccaagagcaccttccggcggcacccagttggctgaacaaaggtgacaacgcatggcagttaacagcagccaccctcgttggtcttcaaagcatgccgggtctcgtgatcctctacgcaagcatagtgaagaagaaatgggcagtgaattaagctttcatgggtctctatgcctttgcagcattctaatatgttgggtgttgtgtgttacgcatggcctttggaga

SEQ ID NO: 26885 - DNA, 265 bp, Glycine max
  Clone ID: 701097032H1
cagatgagttcatgcttgatttcatacagtgggagtgtgggaggactcgaagagcttctgcaataattttgaacacctttgatgccttagagcacgacgttttggaagcgttctcgtccattttgcctccggtttattccattggtcctttgaatttactcgtgaaacatgttgatgacaaagacttaaacgcaattgggtccaatctttggaaagaggagtctgagtgcgtggagtggctgaccacaaagagcccacagtgtcg

SEQ ID NO: 26886 - DNA, 286 bp, Glycine max
  Clone ID: 701097033H1
tatcgagccgattcggctcgagcggctcgagtgaacttggaagatacggtttccattatctactccatcttcacgttccgaacttgtagatagaagatcacacttgctcaattcccttctcaagttattgttggttggcaatgcaagatccaaggattcctttgtcagaggagatcttgaataataaaccaaggaagaagaaaaactcaacccagaaggcatctttatttcttttgcagcgaatggtgtcaaggaagatggacaggcatctctgtctttaaaatca

SEQ ID NO: 26887 - DNA, 281 bp, Glycine max
  Clone ID: 701097035H1
gaaaaacaatagcccacaagattggcctgagccaatagtcagagttcagtccttgtccgaaaggtgcacagattcaatccctgagaggtatatcaaacccctcagtgaccgtccatctgatgatgccgttgctgttgatgatgccaacatcccaatcattgaccttgcagggctttatggtggtgacccagatgctcgagcctccacactgaagaaaatatctgaggcttgaatgagtcgggtttcttccagatcgtgaaccatggtgttagccctcagct

SEQ ID NO: 26888 - DNA, 280 bp, Glycine max
  Clone ID: 701097036H1
gtaacggaaactggtgacacagtttagagagagagagaaacaaagcaaaagccatttggatcctctcttctcttctttgatctccgttacccttttcgttttctcaacacagagagagagagagagtctttcggagttcgtttgcgtgtgttgtgtgatcagtcaccgatggcagcaccacctgcgagggcacgtgccgattacgattacctcatcaagcttcttcttatggcgatagcggtgtcggaaagagttgtctgcttttgcgattttctgatgg

SEQ ID NO: 26889 - DNA, 278 bp, Glycine max
  Clone ID: 701097037H1
gaaaaattaagcaacgattcaagaagaaaatgggttctgaacttgaagctcccattcacgtcctcatggtgtcctatccagcacaaggacacataaaccctttgctcagactaggtaagtgccttgctgcaaagggcttatttgtaaccttcaccacctcagagaccgctggtaaaaacatgcgaaccgccaataacatcactgacaaatcagtgattcctgtcggcgaggttttctcaagttcgatttctctgaagatggcatggcagatgatgatg

SEQ ID NO: 26890 - DNA, 275 bp, Glycine max
  Clone ID: 701097038H1
gtaaaatttgaacacgtatctgctcctcagcctgatgatattgccaaagccgttagtggggaagctgctgaaatgattatccaagtgtctgatagtgtggttcctgcattcaagtctgctgctgaagatcttttgaacaattctggtttaccagtcattgaattactggcaaaggctcttgcaaaggctgttggttatactgaagtaaagcaaagatcacttctaattccatggagaactatgttacattacttcttgagactggcaaaccaatc

SEQ ID NO: 26891 - DNA, 277 bp, Glycine max
  Clone ID: 701097039H1
cctgttgcatcattggagcatggtggtggtggaggaggagtagtagctgtggcctcctctaccaccacctgttgcatcattggagcatggtgaaggtgctcatcatgaaggagaggccaaggagaagaaaggtatattagaaaagatacaagagaagcttcctggttatcactccaagacagaggaggaaaaggaaaaggaaaaggagagtggtgctcattgatattaagattgagacaaggcttttttgttggttggagatgcatgattgtggtgt

SEQ ID NO: 26892 - DNA, 277 bp, Glycine max
  Clone ID: 701097040H1
ctcagttctgccacatattaacattccggcgcaaaatgaaggtcatcgccgcctacttgctcgccgttttgggaggcaacgcagccccttccgccgatgacttgagggacatccttggctccgttggagctgacgcgaacgatgacaacatcagcaacttcttgtctgaagttaagggcaaagacattgtggagcttatcgcctccggtagggaaaagctggcctccggccttctggcggtggcgccgcgttgccgttgctgccgctcccggcggtg

SEQ ID NO: 26893 - DNA, 131 bp, Glycine max
  Clone ID: 701097041H1
ctcgagccgattcggctacgaggggatctcaatgacacagcgatgagttttggaggttagtaagtacatccatattgtaacggggaatagttaagtaagttgttagtctcttggatattcatagagtgagt

SEQ ID NO: 26894 - DNA, 278 bp, Glycine max
  Clone ID: 701097042H1
gtcaactctcgttcaatcaccagcgattaagcgtgtctctcctaataccaaaacgctaccgttttgctcttttatttctctatggattgcaagaagcgagttcgggatgactcggacgagtcagttctggaatcgcccgaggcgaagcgactcagggacgatttactcgagttcttcgacgacgccgacgacgcaccttcctctcaggaccttgactccgtcatgaaggcctgcaggaggagatttccggcgtggcctcagattccggcgagtctcag

SEQ ID NO: 26895 - DNA, 277 bp, Glycine max
  Clone ID: 701097043H1
tgcaaattttcttcccctcaatcgtatattgctcaggtggtgttcctgttcccccccaagcacccctgagattcgttcgcaaaaagcttaataagaacaaaaaataaaaataatattcttcgttattatttcatttcaatttcgttttcgttttcgttttctgttttgatttgatcttccaatggcgtccgatggctttaccgacaagaacaccgtgttcagaaagctcaggcgaagtctgaacataagatgtgtttcgattgcaatgcgaagaacc

SEQ ID NO: 26896 - DNA, 270 bp, Glycine max
  Clone ID: 701097044H1
cctcgagccgaatcggctcgaggacatttttcaaacatttgaaggacacaacacagttctgcaccaacaggttgcaggtgatattttgaaacaatacaagggaaagttcaaaggtggaactttcgcagtgacatggaactacttgagagaatccatgaatacttatctgtcacagccaaatccggttactgctcggtgggaaggcgaagaccatttacgagatcctaaatttcattggatgcgttcagataccgaacatctagattactt

SEQ ID NO: 26897 - DNA, 276 bp, Glycine max
  Clone ID: 701097045H1
ccactccatcatcgacatggacgctgatgttatcaccattgagaactctcgctccgatgagaagctcctgtcagtcttccgtgaaggtgtgaagtatggtgctggaattggccctggtgtctatgacatccactccccaagaataccaccaactgaagaaatcgctgacagaatcaataagatgcttgcagtgctcgagaagaacatcttgtgggtcaaccctgactgtggttcaagacccgcaagtacactgaagtgaagccagcctcacaacat

SEQ ID NO: 26898 - DNA, 254 bp, Glycine max
  Clone ID: 701097046H1
ggacaactcagtcgttatgggaacattgaactcagtccatcagctggtgtcctaaattatggtcagggtttattcgaaggcacgaaagcatacagaaaagaaaatgggggcttgctactcttccgtccagaagaaaatgccattcgcatgaagactggtgcccaaagaatgtgcatggcatcgccttccattgatcattttgttgatgctttgaaagcaaatgtcttggctaatagcgttgggtcctccaccgg

SEQ ID NO: 26899 - DNA, 255 bp, Glycine max
  Clone ID: 701097047H1
tggtaactgatttggtaggtagagttttccttgcaagacaaaatttccctgtgttttcctgacaaccttggctaaattattgccttgtgattgtattatcctttcaatcaaaaatgctgttgaagttcaatcaactacttacttttgagttttgattcttttctttctgcaggatgctgagtgccttctcgttttttcttttgggagacactttcccccattttttattaataattcttgtgttatccttagttt

SEQ ID NO: 26900 - DNA, 235 bp, Glycine max
  Clone ID: 701097048H1
gcttgcaacaattgacaatccatcaaatgcttttgaatgggcacttgctgaaatgataaaccaaccggagttactccaccgagccgttgaagaattggatagtgtggtaggaaaagagagactggtccaagaatcagatatacctaaactcaactatgtgaaggcttgtgcaagagaagctcttcgccttcatcccattgcaccttttattcctccccatgtctctatgagtgac

SEQ ID NO: 26901 - DNA, 275 bp, Glycine max
  Clone ID: 701097051H1
gaatgatgcagggtgtatgtttcacagtgaaggaggtctgatgagctttgagcatccaatgaacaagttgaaggcaatgccaagagtggacagtgaaggggccatgtgtggggccaacttcaaagttgataagttcgccagagtcaacagcattcctcgagtgggaagtcaatccaattggatggaatgggaccaacattagcttaaaaataaagccttacgataatgtaaataaaaaaaaaaatgtcatctatgtatgctcctttcctaactta

SEQ ID NO: 26902 - DNA, 280 bp, Glycine max
  Clone ID: 701097024H1
tggttattgtaatcaattctactatatgttgctctgtttaatttgttttagttggtgtagttgatatatctggtattagtttaactattattattattattataattaggttaagtttataaatggaaacattagtatagtatagttattatgtagctagggtggtttatttgcggcgctaactgtattatgtcgatggctctctaccttgttgaagagattttgtttatgaccattatgactagtgagcttgttgtttattttagatttaaaatttttg

SEQ ID NO: 26903 - DNA, 284 bp, Glycine max
  Clone ID: 701096996H1
caaagcgtctcttacgtacttgccaaagaggaacaaaagtgtttgactgttgatagcatcatcaagaagaagttgtagagatgttagggctatttgacaagagccacaagatcaagggcactgtggtgttgatgcccaaaagtgtcttggacattaacgacttgaattcagtcaaaaatggcggagttggtggcgttgtctctggtatctttggcgccgtcgccgacgtaaccggccaaatagttgatactgcaactgccatcttttcccggaacgtctccttc

SEQ ID NO: 26904 - DNA, 291 bp, Glycine max
  Clone ID: 701097001H1
atgatgtcgaggtttctggatcaccaacagaaaaggcaattttacaatggggaatacagattgggatgaattttacggcagctcgatctgaatcatcaattattcatgttttcccattcaattcagagaaaaaaagaggcggagttgcaattcaaacggctgactctaacatccatatacactggaaaggtgctgctgagatagtcctagcctgctgtacaggctatgttgatgtgaatgccagctggttgggatggatgaggagaagatgacatttttcaaaaaagctat

SEQ ID NO: 26905 - DNA, 282 bp, Glycine max
  Clone ID: 701097002H1
cagaagagaagaagaagaagaagaagaagaagctctggattccacctcttcccgtcgttcgagacggttgttgtgctgcttgctcttcaggttgacctgggattgaatctaaagaatcttgatttacattttgagatatggagggagtttgtttctggacaaattgctaccagtatcggttttttgcattccaagaagtgcttgattggcgagttttcatccttggagattttcttcggtttcctttgtgaattgcacttagggttctgctccgctttaatg

SEQ ID NO: 26906 - DNA, 280 bp, Glycine max
  Clone ID: 701097003H1
cgacaagatctaacgttaacgttatctaaatctcttttgaaagcaatttgtgttatttctcgagttcttgtttttatggtctaaagcaattatgggaagtttttttggtctttgtcaatatgcgcttattctacatgctaatatgcgcgtgttggatgatgaatcacctcaccgagtcttgggattttttttgggggggtaagttatgcgatgtaaccttatccttgcgcatataggccacggcttccgtgcgccggtgatttttaagtaacttcttgag

SEQ ID NO: 26907 - DNA, 284 bp, Glycine max
  Clone ID: 701097004H1
tttgtgttgggtgtttcttcctccgccgcagccgctcctgctgctgccacctcctccactcaccaccttctcagtggaacccttcactctccttcttccctcttaacttcccatctatttcccacaacttcggtgctgtcatcttcactgcacttcaggtgcgttccaatcaaagccatggctgaagttgatactatagcagtgtcaaaaactgcttcttcttctgctccgggagcaagcaagccttgatatcattgtcagacaagaaggatcttgcatttgtt

SEQ ID NO: 26908 - DNA, 277 bp, Glycine max
  Clone ID: 701097005H1
ctcgagccgctcgagccggttattaggaccgccttggttgatgcagccagtgtgtcatctctgatgacaccaactgaagctgttgtgtctgaactcccgaaggacgataaagatgttcctgccatgggtggtggcatgggtggcatggattattaaggggctattttccctgaacaaccttgcttcctttaattggacgtagattggggtggtgtttcaccactattttgctgctttttctttcttatttattgacagaaggcatcactgtaatcat

SEQ ID NO: 26909 - DNA, 280 bp, Glycine max
  Clone ID: 701097006H1
aaagcacttagtgctattcaataattacgaaaaaccaacagcgagtgttgtttttgtttggtccaggctggaccagggaatgaatagagatgagaggctttcggttgaagagaactgagttaagcggcgaagcaaacgcagaatcggcggcagaaattgccaccggaagcacgtcgaagacgggtgaaccaaacacaaaattccatccaccacttctcttttcaatccccactcaaatctgtgaagaaaatctcaatttctaaattgtaattcttagcac

SEQ ID NO: 26910 - DNA, 279 bp, Glycine max
  Clone ID: 701097008H1
tctcgagccgctcgagcggctcgacggctcgagagcagaaattcacacaggcttttaaatacatgttatacgcaaatatgtgtctcctaacaccaactgacttgaagcgtatttttgagaaagtggacgtgaatggcgacggattggtgagccttgaggaactgaatcgattgcttcagatgacgggcaattcccaatatagcatagaagagttggaatcacttgtggaaagaaaagtcttggtttcagtgatttcttgttcttttacaactcaatatc

SEQ ID NO: 26911 - DNA, 281 bp, Glycine max
  Clone ID: 701097010H1
tctcgagccgaatcggctcgagcggctcgagtctgaatccaattcgccttcttcttgttctgcgtttaaggcaatacaacatctactactcatactcaaagtagcttagtgttttgtttagcatatcatggagaataataatcagtcgttttggcaattcagtgaccagctgaggttacaggcatccaatttggcgaacctttctctaaacgattcgatttggagcaacaatacatctccaagaggcgtgatgaaaggattaattttgacatcaaagtggg

SEQ ID NO: 26912 - DNA, 281 bp, Glycine max
  Clone ID: 701097011H1
gttccatttcccgcttcttcttttttccctcacttttccccggcgagaaaatgagagaaatcctccacattcagggcggccagtgcggcaaccagatcggagccaagttctgggaggtgatctgcgatgagcacggcatcgaccacaccggaaagtacagcggcgactccgaactccaattggaacgcatcaatgtctactacaacgaggccagcggtggaaggtacgttccagcgccgttctcatggatctggagcccggcacaatggactcggtcagat

SEQ ID NO: 26913 - DNA, 283 bp, Glycine max
  Clone ID: 701097012H1
ttggatagggaggagaagctgagggatattggatctagaaacttctttatgtgtccgaggaagtgtggcggcggcggcggcgacggtagaggaacgacgccgtttgcttcatgttcaagagaggccgacaaaacgaccaagggtggcgcgtttggttggttaaggttcatggatttctcatgatgaatattattattggaggctaatgttttccctttggcgctgccagccacgttatttggagatattttcattattatttttagaatgaatcagtgaaatg

SEQ ID NO: 26914 - DNA, 219 bp, Glycine max
  Clone ID: 701097013H1
atccaaacgaagtaacgaaccaaccaatcaccctgtctttctgacccaaaaacatagtcccaaatcgaacaaaatcaatcaactaactcctccaacgttgttgttattatgcagacaacaagttccaacactcgggcatcgatccgtcggagatctcacggcaggtcgctcgacacagaatatctgcgagagaagtcgcagaacgacgtctccagcatg

SEQ ID NO: 26915 - DNA, 268 bp, Glycine max
  Clone ID: 701097014H1
ccgaatcgaggcctccgaggacacgtggccgccgcggaagagcgtcgtctcctgcgccggcgtctgccgcagctggagacatatcaccaaagacattgtcaaaacgcccgaactctcctccaagatcaccttccccatttctgttaaacagcgctagctgaagatgggaagttccttcttgctgcacgcaaatgcagacgtccaacctgcacagattatatcatctctcttgacgcaatgatatgtcaaaggggagcaactcctatgt

SEQ ID NO: 26916 - DNA, 288 bp, Glycine max
  Clone ID: 701097015H1
cgccaccttaaatataacaaatacttgtctggtaaatgtaagttttatcctcctatcctcttcacaacacttgacaaagtgatgatgagaacaccaataagcagtgatgaaagtggtttgaagaaggggccatggagcccagaagaggacaaaatattagtggatttcattgagaaacatggtcatggaagttggagagcccttccaaggcttgcaggcttaaacaggtgtggaaaggttgcagactgaggtggactaattacctcaggcctgacatcaaacgcggaa

SEQ ID NO: 26917 - DNA, 278 bp, Glycine max
  Clone ID: 701097016H1
tcggaattgcccgcttcagcgaatcggtcagtcagcgtgaaaggcgaggttatcgcaaacccagacccacatctctcttgcgaaggaaaccgatgggtccgatgctacaaaccattctcactgtgcttcttctccttatgcttcttctcatcgtcatttttgctttctttctcttcaaaccatggcgcttctttttctcttcgcgttttctctccttcatcaagggggagctatcgcggccccttttgggacgtaggtgatgcgtcgtcgtttaatcg

SEQ ID NO: 26918 - DNA, 271 bp, Glycine max
  Clone ID: 701097017H1
atcggctcgagtgaattcatgataaaacccttcaccgttcctttattatacattttcctgtcaataaagggatcaacgggttgggggatcaaatggtaaagttctactgttggtaaattggaggattagaaacatgactattgctttccgattagctgcttatgcaccaattgctatctcatttatgctattgattagcgtacctgttgaatctgcttctcctgaagctggtcgcataacaaaaatgtcgtatcttccggtacatcattat

SEQ ID NO: 26919 - DNA, 292 bp, Glycine max
  Clone ID: 701097018H1
gactcgagcagctcgagcggctcgagcggctcgagctcgagccgattcggctcgagaaacccacaggcacgctgaacatggaacacagaacccatagaactcaacctggcttcagcaaaggatctcaaagacttgagtatattctcaaagatggatgtatatgctgtgctttcactctccggcgatcaaaagatcaagactcccgtccacagaaacggcggcatacaagcaacatggaatttcgggtcaagttcacttttgatgaatcggtggcgcggcagaaccgtttggg

SEQ ID NO: 26920 - DNA, 278 bp, Glycine max
  Clone ID: 701097019H1
ttctgttacagctgaggattggttgaagcctaatgtagtgttggaagcatttgaagctagggcttctaggatgtcagttgcttgtgctcaaaatcttagcaagtttgctaaccctgaagagggttttcaagaactagctgctgatttagttgatgccgcggttgctcattgccagttaattgttgtttccaaatttattgagaagttgcagcaagatatacctggaaagggaggaaaaagcaattagaagttctttgcagcatttatgctttgtttct

SEQ ID NO: 26921 - DNA, 280 bp, Glycine max
  Clone ID: 701097020H1
cacaaagcgggttactgtctgttcaagctaccatctctctctctctttcttagtgcctccttgccagaagttaaaatggcccaagaaactttcctattcacatctgaatcagtgaacgaggggcaccctgacaagctctgtgaccagatctccgatgctgtgctcgatgcatgcttggagcaggaccctgacagcaaggttgcctgtgaaacctgcaccaagaccaacatggtatggttttcggagagatcacaaccaaggccaacgtggactatgagaa

SEQ ID NO: 26922 - DNA, 283 bp, Glycine max
  Clone ID: 701097021H1
ttctagtcccaaagagctaacaagagattcaagaccggcatggctaatgaagaggaacagaaaaaccacctcttcggcatcaaagatctcggtcacaagactctccttcagagtgatgcactctatcagtatatacttgaaaccagtgtctatccaagagagcacgagtgcttgaaagagatacgcaagatgactgcaaaacacccactgaacatcatggcaacaccagcagcgaaggacaacttctgagcatgcttgttaagctcacgaattcaaagaacgc

SEQ ID NO: 26923 - DNA, 266 bp, Glycine max
  Clone ID: 701097022H1
cttaacgcaacaaacacatagccacatcttctctttctcttcccatggcattctgactcatacccaaatcattgattgtttgtctatcgaatcggtgagaaaatggcagtggagctgatggggttcccccaaatgggcgaacagaaggcaattgaagaagcagccgccgaagcgctcaagggcatggaacacctcctctgtctcctctcccatcaacttcccacctccgcactcaccacaccgacgccaccgtttccaacttcaaa

SEQ ID NO: 26924 - DNA, 280 bp, Glycine max
  Clone ID: 701097023H1
cgccaaccaaaaccttctccgttaagaataactctctctctctctctctgaaatgggcgaggaatctcaagggattaagctgtttggtgcgctgattacattgaagggtggggaagtaaagaaaggagaaaaaggaagcgaatatgagagggtggagaagagagcagagaagataataccctgcccgagatgcaagagcatggaaactaaattctgttacttcaacaactaaacgttaatcagccgaggcatttttgcaagagctgccagaggtactgga

SEQ ID NO: 26925 - DNA, 281 bp, Glycine max
  Clone ID: 701096995H1
caacaactataataacatctttctctctccgaacagatcacactatggccacctcaagcgccaaatcagtccatgatttcaccgttaaagatgccaagggaaatgatattaatcttggtgactacaaaggaaaggtccttatcattgtcaatgttgcctcacaatgtggcttgactaattcaaattacactgagctcagtcagttgtatgagaaatacaaacagaaaggtctggaaattctggcatttccatgcaatcagtttggggcacaggagcctgga

SEQ ID NO: 26926 - DNA, 184 bp, Glycine max
  Clone ID: 701096969H1
aagagaatggccactttctgattggatttgaatcgtctatgtaaaatatgctatgtttattatgtcttagattctttattgacttctgtcttttgtttctgccttgttttttagtttctattttatagttgctaatgtatatgtatattaaggggtcttaacaataaatcatattctttgtacc

SEQ ID NO: 26927 - DNA, 279 bp, Glycine max
  Clone ID: 701096970H1
cacggagttatatgcttctgaaactcgtaaactggttgaaagtttcattaattatgtcatttacaagctatcaagaagtggacttcaaaatgtggagggaaaacggattcatgatttctttctgacactggcaacctgcaacaccattgtgcctcttgttgttgagtgttgacacacctgaccctgatgtcaagctgatagattaccaaggagaatcaccagatgaacaagcactggcttattctgctgctgcctatggttttatgctcatagaacgaa

SEQ ID NO: 26928 - DNA, 279 bp, Glycine max
  Clone ID: 701096972H1
actcgagccgaatcggctcgagaccatggcctcaaccaacgctctctcttcagcctccattctacgctctcccaaccgccagtactctgaccgaagagcgaaccataatggaagagtaaattaccggaaaccgaataaccgtttctccgtgaaagcctccgccaaagagattgcctttgaccagcattcccgctctgctatgcaggccggcattgacaagctcgccgacgctgttgggctcactcttgggcccagagggaggaatgttgtgttggatga

SEQ ID NO: 26929 - DNA, 281 bp, Glycine max
  Clone ID: 701096973H1
cttgtgttcttgattatactctgcgaaataatttttgcgtttcattctcttataattagcatggcctttgccgcagttaaagtgttcatgatattggggcttttagccaccgcgtgtgtagcacaagcccctggacctgcacccacgcaaccaccatcaacaaccccatcaccgtccacgtcagcacccgccccatcaccaaccgcaaacacccctcctcctgcggctgcacctgcacccgcaacacccacacccacacccgctccttcatctccaactcc

SEQ ID NO: 26930 - DNA, 278 bp, Glycine max
  Clone ID: 701096974H1
gggagttttatgatgaatgttcaggagctggccaccatcaaggtggagaagctccctgttaagatattgttgttgaataatcaacacttgggtatggttgttcagtgggaggatcggttctataagtctaacagggctcacacatatctgggagacccctctaatgagaatgccatataccccaatatgttgaagtttgctgatgcttgtgggataccggcagctcgtgtgaccaagaaagaagaccttagagcggcaattcagaaaatgctggagac

SEQ ID NO: 26931 - DNA, 278 bp, Glycine max
  Clone ID: 701096975H1
tgaatatcgtgataagaccaatagttgcactcaatgtactcaatcagaaacagaagccactagaagtccagaagagctgttattacttgttagattagagcagatgcttctttctgcatcaacaataaagaatgacaacatagaatctggaattcctctcataaaacagaaagctgatgatgactcgtggagccatattatagaggctcttctagttggcagtggaacgtcgactggtactgttgattggcttcttgaagagcttctaaaggataagc

SEQ ID NO: 26932 - DNA, 275 bp, Glycine max
  Clone ID: 701096976H1
agaagctagtgatcaatcatcaacacagagctgagtgtgttgctctgtgaatccaccttcttcttccattggaggaccatttcctcctggaatagaaatactaccacacttttcttctttcacttctctaagttgctaagttaattgctccttcattttttcactcttcgttctcgcgtacccgtgtcacggtaactcgtggtgaagtgttcgaaaatgactgtcacacctaagatctcagttaacgatgggaaacttgttgtccatggtaagac

SEQ ID NO: 26933 - DNA, 276 bp, Glycine max
  Clone ID: 701096977H1
gcaattagttgcatggatgagagcaccaccactgagtcactctctataagtctttctccgacgtcatcgtcggagaaagcgaaccttcttcgatgattacatcgtcggagaaggtttctctgtccccgccgccgtcaaacagactatgccgtgttggaagcggcgcgagcgcagtcgtggatcctgatcacggcggcacggcgctgaggtagagtcgcggaaactcccctcgtcgaagtacaagggcgtggtgcaccgcccaacggccgctggggt

SEQ ID NO: 26934 - DNA, 277 bp, Glycine max
  Clone ID: 701096978H1
atttacaaagcacggttctttcaatgagggattgtgcatatgaggctagtgttgcactgtctgcttttgctcgggtttcaaggatccatactgctctaacttctgaaagtggttctatgcttgaagaggttctagcaataactgaagatatacatgatgtttataatctggggaaagaggcagctgctatccacctgtctcttatggaaggcctttcgaaggcaaatgcaatcctttttccacttgaatcagtgttcactaaggatgtagctgctat

SEQ ID NO: 26935 - DNA, 273 bp, Glycine max
  Clone ID: 701096979H1
cgaaaccctcttcatcttgttctatctgtgacgagcatcatggcctcaagagcagtgttattgttggctatgtgtgtgcttccggcgatggttgtggccattcgcccagcaaagaaccctttttgcgtgaagggtcgtgtctactgtgacccttgccgtgctggttttgagacctcagctaccacctacattgctggtgctgagattatgttgcaatgcaagagcagggttagcaacgaggttgtgtacacgaagaaggggtacaccgactca

SEQ ID NO: 26936 - DNA, 283 bp, Glycine max
  Clone ID: 701096981H1
tgagaagtttcctcaattgggtttgaagcaattcgattgcattgagacaacctggcttcgatcggtgctgttttgggacaacatagacattgcaaccccagttgagattttgcttgaaagacaacctcagtcttttaagtacttgaaaagaaaatctgactatgtgaagaagccaatttccaaggagggttgggaggggatttggaccaagatgattgaattggagaaggcaataatgtacttcaatccttatggtggaagaatggctgagattccatcaaca

SEQ ID NO: 26937 - DNA, 197 bp, Glycine max
  Clone ID: 701096982H1
ctaacttctaagcattcagtaaaagaactaaacatggcagagaccattcgtttggctgttgctgttcttggtacttcttcgttcattaattccttcatcttagaacttaggattataaattatttattactccataatttgagtcttcaaaaaaagtgacttcatagagtcgctgttttttttttttttttttaaag

SEQ ID NO: 26938 - DNA, 267 bp, Glycine max
  Clone ID: 701096983H1
gatggatccagacgcgttggcaaaggcattcgtggagcactactacagcaccttcgacaccaacaggaacggcgtagcgaatctctaccaggagggctccatgctcactttcgaagggcagaagatccaaggggcttccaacatcgttgccaagctcacctccctcccttttcagcagtgccaccactcaatctccaccgtcgactgccagccctccggcgtcaacgccggcatgctcgtcttcgtcagcggaaacttcagctcgcc

SEQ ID NO: 26939 - DNA, 280 bp, Glycine max
  Clone ID: 701096984H1
gtttatcggaacgttgctataaacgttgttgttttcagataaacacgtgactcactatctatctatcaatcgatatctccgagttcagccgaaccaaactccgaagctatggcagagctccaaaccaaggttgaacctgttacggtcccggctccggtggatcccgagccaccgctagctgaggctccgccgctcgagaagaaagcggtggcggtgccaccacctgttccggctgcggcagaggaaaccaaagctcttgttattgtggagaaggagaagg

SEQ ID NO: 26940 - DNA, 279 bp, Glycine max
  Clone ID: 701096985H1
ataacacaaagcacaaagcaaagctcatccttgagttaaaaaatggcagcagcttcttccatggctctctcatccccatccttggctggcaaggccgtgaagctgggcccatcagccccagaagtgggaagggtgagcatgaggaagaccgtcaccaagcaggtctcctcaggaagcccatggtacggcccagaccgagtcaagtacttgggcccattctctggcgagcccccgtcctacctaaccggtgagttcccaggcgactacggctgggacact

SEQ ID NO: 26941 - DNA, 281 bp, Glycine max
  Clone ID: 701096987H1
cttcgaatctggaagccacagtgtggtggaacttaccaaagctaactatgaaaactgtgaagtcgataacaacatcaaagcctttaatagaggaccagctagagtcaccctcaatcgcacaggagaattctacttctcctgtaccttctcaggtcattgcagcagtggccaaaagctaagcattaaggtcactgattcttcatcaccagcacctcagaaagcaccagctgaaggtccttcagcttctgctcctccaccacagaatgctccagctgaaggtc

SEQ ID NO: 26942 - DNA, 281 bp, Glycine max
  Clone ID: 701096988H1
aaaatggaatctgctatttgcctacgctattgccccattccctatggtcccaaaggatttcatggtgcagatcctagcagatttcatctcaagattaaccatgccacccctctttctctccctcaaatttccaccaccagaagccctgttacacgtctcatttgggcatgcaaattgcatgcttgaaagattctcatcagtaccctccgagaatgagggaagtggcaacaaaattttgagaggagtgacactatcttctctggttctgacatgtgttcttg

SEQ ID NO: 26943 - DNA, 278 bp, Glycine max
  Clone ID: 701096991H1
gaagagagtgaagtttgtgaaagagatggcactcgtaacaacaaacccaaccatcaatgaggggcctctgttcgccgaagttgacatgggttccgacttcaacgccccaacggttcgagctaccgttgttcaagcctccaccatcttctacgacacaccagccaccttagataaggctgagaggttgttggctgaagctactagctatgggtcccagcttgtggtgtttccagaagcctttgtgggtggctacccgcgtggttcagcttttggtcttt

SEQ ID NO: 26944 - DNA, 276 bp, Glycine max
  Clone ID: 701096992H1
ggaagacaccactttgaggaatgctattcctgtgaggcaaagggtggctgtgtgtttgtggcgattagccacgtggggaccctcttaggattgtttctaagaggtttggtttggggatatcaacttgtcacaagcttgttcttgaggtttgcaccgctattaagtctgtgcttatgccaaagtacttgaattggcctgatgaggttgcattgaggagggtgaagagtgagtttgagggactttctgggatccctaatgttgtaggctctatgtaca

SEQ ID NO: 26945 - DNA, 277 bp, Glycine max
  Clone ID: 701096993H1
gagtacacttgtcatgtgcctatacataatcataatgtttgctcctaaatttttgtttattcttatataattattgttattttaacagtactcgtcctttggtttctcatgtatttgtactacgactactacttatagtgcagttcttaaaggttgtttgttagtctcagttattgagagagttgagagacacgaagaagaatcatggagaggagcaagagggtaaaagggagagtggttttgatgaagaagggtgtgttggacttccatgacatca

SEQ ID NO: 26946 - DNA, 279 bp, Glycine max
  Clone ID: 701096994H1
gtattattttaccccttttatatccctcaattccactggaaactgctcaccattatcgatcttatcacttattaggctttcagggtcaggttgattgccttgacttctgtaagctcaggttctctccagttcctcacatggacaaagttgtgcatgtgaaaactaatttttaattttgctgcctaatttcttgatcttttgcaggctcaagagagatgttcacattttcataatattcatgttttgattatcttatttgttccatgagttaactgatgt

SEQ ID NO: 26947 - DNA, 281 bp, Glycine max
  Clone ID: 701096968H1
cttgtgctctctcttcagtctctcccacacacccttcttcttcagctgagttgtttgtaatacagcaagatgaatccatggaacatgagaacttccaagttactctctcaacaagtttcttatcctccttatctctttgtagaagagattccaaacatgggaaattccagtgttgtgaccaaggatgctagaggttcacagctgacaatcttctatggtggccaagttcttgtcttcgatgatattcaagctaaaaaagccaaggacatcttgtcttttgc

SEQ ID NO: 26948 - DNA, 278 bp, Glycine max
  Clone ID: 701096942H1
ccgactccaaggccgctacttcgctagacctaactcaacccgatctcgataatagcggcggcggtgctaacggaaacgctaacggcggcggcggtggtggaggaggcggaggaggtgatgatagcaagggcgaggaaggatcggacggtgacaagaggaaaatggctctgttgatgtctcagaaattcactctagcttatgctgcactcgtcggagtgggtggtgtaatgggttatctaaagagtggcagcaacaagtcacttttggctgggggtttg

SEQ ID NO: 26949 - DNA, 281 bp, Glycine max
  Clone ID: 701096943H1
gtttgacctggcctcaaagctctccgccgaacgcgccatgaacgcgtcgccgtttatttggacactaaaacgactcctcaacataggatccgagaagaaactgagagaaacaattaacgtcgtaaacgacgtcgcaaaagagatgataaagcagagaagagaaatggggttcaagacgcggaacgaccttctctcgcggttcatgggatcaatagacgacgacgtttatttaagagacattgtggtgagttttctattagcgggtcgtgacaccatcgctg

SEQ ID NO: 26950 - DNA, 279 bp, Glycine max
  Clone ID: 701096945H1
aacataattggagcaaaatatttccgcatggatggttcatttggagaagatgacataatatcacccagggattcaaatggccatggaactcactgtgcatccactgctgctggaaactcagttgagtccacaagcttctttggccttgcctcagggacagcaagaggaggagttccatcggcacgaatcgcggtgtacaaaccttgttggtcatctggctgcgatgatgccgacatccttcaagcattcgatgaagccatcgcagatgatgttgacgtc

SEQ ID NO: 26951 - DNA, 279 bp, Glycine max
  Clone ID: 701096946H1
ggctggtatactcgcttttcttcagtttgggaagacggtcacggagagtaagaaggaccctattaagcttttgaagttgttggatattttcgcgtcgttgaataagttgaggctggatttcaaccggctttttggtggtgcgccgtgtgttgagatacagaatttgacaagggatcttattaagagcgtgattgatggggctgcggagattttttgggagcttttggttcaggtggagttgcaaaggccgaatccacccccaatggatgaagttggaag

SEQ ID NO: 26952 - DNA, 204 bp, Glycine max
  Clone ID: 701096950H1
caagaatagttcctgatacctgctggaagaataagctggtttgaattagtagagtagtgagcatagtattgatattctagtgttttatgtctgaagtggctcctagcatttaattagctataatgtaatcacataaatattcttaatgaaagtttaatttatatacttgtactacaaaacaaaaagaagaagaaaaacgaaaaa

SEQ ID NO: 26953 - DNA, 282 bp, Glycine max
  Clone ID: 701096951H1
gcttaatgccccaaagcattggatgcttgacaaactgggtggtgcatttgctcctaagccctcatctggaccacacaaatcgagggaatgcctgccactcatactcattttgcgaaaccggctgaagtatgctctaacataccgtgaagtcattgctaattctgatgcagcgacatgtccttgttgatggcaaagtcaggactgacaaaacataccctgctggttttatggatgttgtatcaatccctaaaacaaatgagaacttccgcctgctgtatgaca

SEQ ID NO: 26954 - DNA, 280 bp, Glycine max
  Clone ID: 701096952H1
gagtcactcttcttgcataacccagatctgcagacaatatgcgaagaactggcttgttacatttgttatgccttgtcattgctttagtaagtgtgaaagcagaagatgcgtataagtattacacatggacggtgacttatggaactatttctccattgggtagtccccagcaggttattcttatcaatggtcagtttcctgggcctagacttgacttggtgactaatgagaatgtaattctcaaccttatcaacaagctggacgagccatttttactcac

SEQ ID NO: 26955 - DNA, 281 bp, Glycine max
  Clone ID: 701096953H1
taacccctcaccttacgcgccggtgcgagacgcgtgagtgtgaagaagagacaaaggtgcagttctggggtttggcggtgaagaacagaacacacacgatggggaagaagagaggtacaagttatcaaaagaaagatgccaaaagctcgaaaagtaaaacaagttctcgccatggtgcttattccagtgatgacatggacgacgatattgatacttttcataagcagagggacattgtcgcccttgacataaatgatgatgctgaagaatcggaagatgag

SEQ ID NO: 26956 - DNA, 277 bp, Glycine max
  Clone ID: 701096954H1
cgagaaacaacgccacgctgaaatcccttttttgtgtccatgggcagcagcatgctgaggctagtgttgggcttgtctgttttgagttgtgtgcttgtgacatcctcagctcaaacgtgcagaaaccaaacattctcaaacagggtgtttgccacatgtcgtgatcttccacagttgacggcttacctgcactggacatacgaccaggctagtgggaggttggagatagcattcaaacacgctggaatcacctcgaccaacaggtgggttgcatggg

SEQ ID NO: 26957 - DNA, 255 bp, Glycine max
  Clone ID: 701096955H1
ctctctctctctcttcttcttcttcttcttcttgcacgtattgttctaatccacaaaaataatggccttaaattacaacattgccctcgccttctctacggttctcacgttgcttctccttcccttaccaacccttggggagctcgtgcaggagcagccattagtgcgtcaaagtacacaacggccaactcttgaaggggcgcctcaccgtcaatctcatttggtaagggaactttaacccggttcaacggtcca

SEQ ID NO: 26958 - DNA, 285 bp, Glycine max
  unsure at all n locations
  Clone ID: 701096956H1
ctctttccattgttctactttttcagtcccaccaccaatggccctccatgatctacccttcacacccatgaccaccacttccctcttcatcattctattttctctattttccaccccttcccattcttcnctcacttgtgcttcccagaagctcaaccgcacctacgccaactgcaccaacctccccaccctcggcgccaccctccacttcaccttcaacgccaccaaccgcaccctctccgtcgccttctccgcctctcctccctccccctccggctgggtcgc

SEQ ID NO: 26959 - DNA, 282 bp, Glycine max
  Clone ID: 701096957H1
gtgggcagctggaggattcgagagttctcaagggagtcatgataaacaaagatgtggttgcccctggcaaaatgaggagaaggattgttaacccacacatcattcttcttgattctccccttgagtataaaaagggtgaaaaccaaacaaatgccgaactgctcaaagaagaagactggagtctcttattgaagatggaagaagaatatattgaggagctatgcatgcagatattgaagtttaaaccggacttggtaatcacagagaagggtctgagtgatt

SEQ ID NO: 26960 - DNA, 283 bp, Glycine max
  Clone ID: 701096958H1
atggagaaggtctccgcctccgccgagagcgaggagctgaccgtggaggagcgtaacctcctctccgtcgcctacaagaacgtgatcggcgctcgccgcgcctcctggcgcatcatctcctcaatcgagcagaaggaggagagccgcggcaacgaggaccacgtcgccgtcatccgcgactaccgctccaagatcgaggccgagctctccaacatctgcgacggaatcctcaaactcctcgacacgcgcctcgtcccctccgccgcctccggcgactccaagg

SEQ ID NO: 26961 - DNA, 277 bp, Glycine max
  Clone ID: 701096959H1
attgatacctatggtgggtggggtgctcatggtggaggtgccttttcagggaaggaccctaccaaggttgacagaagtggtgcctatatcgtgaggcaggctgcaaagagtgttgtggcaaatggccttgccagaaggtgcattgtccaagtttcctatgccattggtgtccctgagcccttgtcagtgtttgtggacacttatggaactgggaagattcctgacaaggagattcttcaaattgtgaaggagaatttcgacttcagacctggaatga

SEQ ID NO: 26962 - DNA, 282 bp, Glycine max
  Clone ID: 701096960H1
atcaaattccaactcttgcaagctagcttctaccaatctttcacaactcttgttcaaagagaaacagcttataggatgaagagcaaaatcttgaaggcactgccaaaagcagtttcagcagtcacggtgacatttcaaaaccatccattcagcccaggcagggaccacaaatcaaagcctatcgtatccatgattccccatgaagctagaagaaaaacccatgatagaggcaataataacgacattgatgaaatttattctcaagaacccacttcaccgaaa

SEQ ID NO: 26963 - DNA, 279 bp, Glycine max
  Clone ID: 701096961H1
aaaagggcaatgcattagaagttgttttcatctcaagtgacagagatcaaacctcctttgatgaattctttgcgggaatgccatggttggcacttccctttggggactcgaggaagaaattcctgagtcgcaaattcagggtatctggcatccccatgcttgtggccattgcatcaagtggtcagacattgacaacaaaagctcgagatctggtttcactctatggagcagatgcatatcctttcaccgaggagagaataaaagaaatagagacagaac

SEQ ID NO: 26964 - DNA, 281 bp, Glycine max
  Clone ID: 701096962H1
agcgcagtgaaaaaagcttacgttgaaacagatgagaaaatattggaacaagaacttgtgttcgggcgaggagggtcaacagctgtgactgcaatacttattgatggtcagaagcttgtagtagcaaatgttggtgactcaagagctattatctgtgagaatggaaaggcaagacaactatcagtggatcatgaaccaagcaaggaaaaaaaatcgattgagaggcgtgggggttttgtatcaaacattccaggagatgtccctcgagtagatggacagct

SEQ ID NO: 26965 - DNA, 289 bp, Glycine max
  Clone ID: 701096964H1
cgagaatttgtgtctgctcactcgctcttctccgccacttctgaatctattgaatcaacaatcatgtcggacgaagagcaccatttcgagtccaaggccgacgccggagcctccaaaacctaccctcagcaagccggtaccatccgcaagaacggctacatcgtcatcaaaggccgcccctgcaaggttgtggaagtttcgacttccaaaactggaaagcacggtcacgctaagtgtcactttgttggaattgatattttcactgccaagaaacttgaggatattgtgc

SEQ ID NO: 26966 - DNA, 278 bp, Glycine max
  Clone ID: 701096965H1
cggcactgagttattagtaattgtgttgtgttgtgttgagcagagagaaggatcaagacaggataagaagaaacatggaatacggttacggttagggttcaggttagggtgatgatgccggagtatcaagggaaagggaggtaagaccaggaagaggggaaagaacgaggcggacgacgacaagcgagagctggtgttcaaggaggacgggcaggagtacgcgcaggtgctccggatgctgggtaacgggcggtgcgacgcgatgtgcatcgacggga

SEQ ID NO: 26967 - DNA, 277 bp, Glycine max
  Clone ID: 701096967H1
tccttatctctctctctctctatctctcccgaattattgttcgttcgacccttttacttagtattccctgtttccggtattcgctcccttgtttctgcagtctggttctacttagatctctgtcgcgcaccagatctggtgcagggtaagagggttgggtccatcaattttgtatcaatccttccttctcagcggtaggcgttgggataccatagtctttccgggaaccaagatagggttctctccgttttcagtagatctctcactgtcttctttt

SEQ ID NO: 26968 - DNA, 280 bp, Glycine max
  Clone ID: 701096941H1
ggagagtccagcctgccgcttcatgagatggaaggacgaagaacttactatctgggaatgtttttgggtggggcttacgaggaggcgctcggtggaggtcacaacttgttcggcggccccagcgtggtcagggtgtcgcagagcatggccctcacagctttgcggtcacgcgtgccgtgccggggccatcctgtggagatgttcttcgagtgatgcagcaccagcccgagctcatgttcgagacactcaagcaccgcgcgcaggagtatgtcagccacga

SEQ ID NO: 26969 - DNA, 220 bp, Glycine max
  Clone ID: 701096916H1
gaggacactttgaaggcactggagatgggtgctgtggaaacactcattgtatgggaaaatttggatattaataggtatgtgctgaaaaatggtactactagtgagattatcataaaacacttgaacaaggaacaagatgctgatcaaagcaacttccgtgattcagccacctctgcagagttggaagttcaggagaagatgcccttgcttgagtggtttg

SEQ ID NO: 26970 - DNA, 284 bp, Glycine max
  Clone ID: 701096917H1
ggctaatctattaggcgctgttctctcgtcttctacaaaattttctgttcgatctcaaccaaggttgttccttccaccgccatgagtatcatcttcggaagcgaaaacacccgcagagctgcgggaaaataagaggatgctggacaaatcaatcagagaaattgagcgcgagcggcaaggcttgcaaacgcaagagaagaaattgattgcggagataaagaaaagtgccaaacagggccagatgggagctgttagagttatggcaaaagatcttgttagaacaa

SEQ ID NO: 26971 - DNA, 287 bp, Glycine max
  Clone ID: 701096918H1
cgaaatatggcttcaactcatctgcttcccctagcaaccttcttcttacttctctccgcttcttatctccagattgctggggcggaagcacaaccgttgactagtctcaagcttaactctcatattcttcaggagtctactgctaaagagattaatgaaaatcccgaggcaggatgggaggctgctataaatcctcgtttctccaattatacagttgaacaatttaagcgccttcttggagtcaaaccaatgcctaagaaggaacttagaagtacacctgctatatc

SEQ ID NO: 26972 - DNA, 284 bp, Glycine max
  Clone ID: 701096919H1
gatggatcttggtcatcatccagtactcggttctcttttttccagagcatacagttatatttaaacctcttttttgcaggtttcctgtaattggaaacctgttacgagttttttggcactccgttgatgggatgccactttcaaaatggctgtttatctctgccagcatagttaccgagttctggagttaggtatttttctttccagtgttggcacccgatgtttttagcactgttttgtatcggttttgccaccatgtgtgtccttgtccttgtttctttgca

SEQ ID NO: 26973 - DNA, 285 bp, Glycine max
  Clone ID: 701096920H1
ctcgagccggatctggtcatcgttgggatctccatacgccggatctgctaaaatacgcttgatccatatgggcctcctcgaccacttgtgggacgacaccgtcgccggcccaaggccggaaaacggtctcggcaagctccgaaaacaccacaccttcactttccgacctagctccggcaaggaaacggagggcgggagcgtgagatcgtacggagacgaatcgtcggaggaagcgacgagagtgacgcgacatatcatgatcgtgaaaccgcccgggtaccagag

SEQ ID NO: 26974 - DNA, 287 bp, Glycine max
  Clone ID: 701096921H1
aaattccccaaactcgtgggcccaatccagcccgcaatcgccaaactcaccaaactcaagtaccttgatctctccaacaacaatctctctggcccaatacccgattttttcgcgcaactcaagaacctcgacgatatcgacctttcctttaacaacctctccggccccataccaagctcgcttggtaaactgcctaaactcgcgtatctagatttgagccgcaacaagctcacgggctcaattccggcctcatttggatccttccaaaagcccgggccggctattat

SEQ ID NO: 26975 - DNA, 283 bp, Glycine max
  Clone ID: 701096922H1
tttgttttggagggtagacctttaagggcttgtcttggaaccacaaaatattgtcatgcatggatccggaatgtggtatgaggatgactggtctagatagaattttcaaattatgcttaattacctgtgcttgtaattgagggaaagatctctatgaccagccttgcagcaatccggattgtctgtatttgcatgagattggctctcaagaagatagttttaccaaggatgaaataatttcagcatacactagaagtcgagttcaacaaatcactggtgccac

SEQ ID NO: 26976 - DNA, 281 bp, Glycine max
  Clone ID: 701096923H1
gtggaagcagaaggcattgttatggctataccaatgcctggacatccagtacaaagccaggaacaggacagtgtgctttatgattgtacacgtttgtgtgatttaattgatcgtcatgattccgcttttttattgactgatacaagggaaagtcgatggctcccaacacttctctgtgccaatactaacaagattactgttactgctgcactggggtttgatagtttcttggttatgcgccatggagctggtcctttatctgcggatatgccagtaaataa

SEQ ID NO: 26977 - DNA, 284 bp, Glycine max
  Clone ID: 701096926H1
ggcgaaaatggtgatatacaaagaatggattgtagtagtcgtggtggttggcgctttctgatgcacgtgtataaaaggcattgtactttgaaattgcaattggtgtacatttcctctccctctccattttttgttgctccctcaaagtttgagagattcaggttcagatctgatcaacaaaaatggcgactgtgtccctctcgccaaatacaagctcgttttcttaggcgatcaatcggtcggcaaaaccagcatcatcactcgcttcatgtatgacaaattcg

SEQ ID NO: 26978 - DNA, 285 bp, Glycine max
  Clone ID: 701096927H1
ctcgagccgcaatatgcttatggactagctgcacttggatgtcagctacaagctttaggattctgttgaaaccccgtatattgatcttgataaccctttggccaaggaattaatggaaatctatgagtccataggcgacacattagcctttcaatatgggggttctgcagcacacaataagatattttctgagagaagaggtcaatggaaggcagcagctcaatcccaggaatttattcgaacactacagcgttattataacaacacatatttagatggtgataa

SEQ ID NO: 26979 - DNA, 284 bp, Glycine max
  Clone ID: 701096928H1
ctctccgaaatccccaaattgcctgtgaatgctagaaaccctaggcacgttcgatttgatgctctcccatttgcaatcaagggcgagcgcattcggttcttgcacgcaaggctggtactaccgctgcatcggcctcgatccctgaattcatcattctttctcgcaccatctttttctattccgattcgatttgttgttgttgttgttgttgttgtgtttttgtttccttccttgacgaatcatcacgatgttgatgagcaagcagaagaagagccagatccaga

SEQ ID NO: 26980 - DNA, 296 bp, Glycine max
  Clone ID: 701096929H1
ctttggcttccttttcatagtgtttgtgatcctattaatcacctgtgccgagattaccattgtgctttgctacttccaattgtgcagtgaggattacaattggtggtggagatcttatctcactgctgggtcctctgcgttgtacctcttcctctactcaattttctacttctttaccaagttggagatttcaaagctggtatcgggcatcctttacttcgggtacatgataattgtttcatatgccttctttgtgttgacgggaactattggcttctatgcttgcttctggtttg

SEQ ID NO: 26981 - DNA, 285 bp, Glycine max
  Clone ID: 701096930H1
caccggtttatgtcctcctatgaacagagggtgcaacctttgataaaaggtatcagtacctcttgtttgctgctgaaccatatgaaatcgttgctttcaaggtgcccagcacggagattgacaagtccactccaaatttcttctcgcactgggatcctgactccaagatgttcacgctacaattgtattttaaatccaagccgccagaggcgaacaaaccgcagcctgcctctactgccaatggcacagcaccatctggtgtaccaccaaggcctttgcccccac

SEQ ID NO: 26982 - DNA, 288 bp, Glycine max
  Clone ID: 701096931H1
caaagccttcctagaacgaaaaaaaaaagaagagcaattttccctcaccaaagaagaagaagcaaacaatggccgatcaacttaccgatgaacagatctccgagttcaaggaagccttcagcttgttcgacaaggacggcgatggttgcatcacaaccaaggagcttggaactgttatgcgttcattggggcaaaacccaactgaggcagagctccaggacatgatcaatgaagtggatgctgatgggaatggtaccattgacttccctgagttcctaaatctcatgg

SEQ ID NO: 26983 - DNA, 290 bp, Glycine max
  Clone ID: 701096932H1
gcagtgccggcgcgcgctgaagtttgctaggttcatgagcaggttcgggaagagttaccgaagcgaggaagagatgaggggagaggtacgagatattctcgcaaaacctcaggttcatccgctcccacaacaagaaccgcttgccctacactctctctgttaatcattttgctgattggacttgggaggagttcaaaagacacagactaggcgctgcccaaaattgctctgccactcttaacggcaaccacaagctcactgatgctgttcttcctcccacgaaagactgg

SEQ ID NO: 26984 - DNA, 285 bp, Glycine max
  Clone ID: 701096933H1
aggacaactacctcaactaccacaagaggttgatagagcttgtaaaagttgggggcgtgatcgggtacgacaacaccctatggaacggatctgtggtggcacccctgatgttcctcttaggaagtatgttaggtattacagggatttcgtgctggagctcaacaaagccctcgctgtggaccccaggatcgagatttgcatgctcccggttggtgatggaatcactatctgccgtcggatcaagtgatttctgatcatcataatcgtggaccaccgttgcttctt

SEQ ID NO: 26985 - DNA, 289 bp, Glycine max
  Clone ID: 701096934H1
tgcgactcagatcctctctcgcatcttccccaaaaccctagccctcttcctctcccgttctctctccagcgccccctctcctccctctctctccgcgctctccttcttccgccgcatctccgttgccgccaacccctccctccaccgcgccctcctccccaactctccctccctccgggccctctccacacgcgccactacctcctccctcaacgaccccacccctaactggtccaaccgtcccccgaaagaaaccatcttgctcgacggctgcgatttcgaacactgg

SEQ ID NO: 26986 - DNA, 283 bp, Glycine max
  Clone ID: 701096935H1
actcgagcagctcgagccgctttgaccggaaaaacaataactttagacattgaaagttctgataccatcgatacacgtgaaggcaaagatacaggacaaagaggggatttcaccagaccagcagaggcttatctttgctgggaagcagctggaaactggtcgtactcttgctgattataatatccagaaggagtccactctgcatttggtgttgaggcttcgtggaggtatgcagatatttgtgaagactctgacagggaagaccattaccttggaggtggaa

SEQ ID NO: 26987 - DNA, 282 bp, Glycine max
  Clone ID: 701096936H1
ctcgagccgcgctgactctgaccttctctggcgaactttctttccttctgattactctgacattgtctcaagggctctcaaccccctctcccttaattcctcttcttcatacaaacaccttttctatgctctttgtcatccactcctcctagatggaggcaacatgagcttcaaattagacaagtcttcgggtaagaaatcttatatcctatctgcaaggcagctttctataacgtggagcaatgaccctttgtattggagctggagaccagttcctgaatc

SEQ ID NO: 26988 - DNA, 281 bp, Glycine max
  Clone ID: 701096937H1
ggccgaccagctcaccgacgaccagatcgccgagttcaaggaggccttcagcctcttcgacaaggacggcgatggttgtattactactaaggaacttgggactgtgatgcggtcactagggcaaaacccaactgaggcagaactgcaggatatgattaatgaggttgatgctgatggcaatggaaccatcgacttcccagagttcctcaacctgatggctcgcaagatgaaagacaccgactccgaggaggagcttaaggaggctttccgtgtgttcgaca

SEQ ID NO: 26989 - DNA, 282 bp, Glycine max
  Clone ID: 701096938H1
taccattcccatcactccccatgccctctcaattcacttcctatccccttctctgattctctccatatattatctcaaacccctctcacagaatgggaagtgctggaggaactgactatggtgcatacacttatgagaatcttgagagagagccttactggccatcagagaagcttaagatttccatcactggtgctgggggttttatcgcgtcacacatagctcggcgcctcaagacagaggggcattacattattgcttctgattggaagaaaaatgagc

SEQ ID NO: 26990 - DNA, 281 bp, Glycine max
  unsure at all n locations
  Clone ID: 701096939H1
ctcgagccgctcgagccgcgcaggatcgaagtttcacatcagccttatccagtttagggtttcggttcctactnctcgctttgacgtatcgaaaccttaaatttgggattaggtctgagcaatctggttggtagaacctttggtcttagagagtcaagttttatgtctggattagacgatcaaattcctactgccttcgatgcttttgctgatgcaaatgctgatgactcgggtgctgggtcaaaggagtatgtgcatattcgcgttcagcagcgaaatgg

SEQ ID NO: 26991 - DNA, 286 bp, Glycine max
  Clone ID: 701096915H1
aaccttttcacacctttcttcatttcacatggaaatcagctccctcgaagactattcttccttcttcttccctgatatggatcccaagcgtcgtggaaacgacaccgctttcaacgacctcctcaattccctcatccacttagacaacaaacaaaccctcatggatcctactcaattccaattcgactcctcccccccaaccaagagacctcgtcgtgccattgaagacatccacaatgtcacggtccaacaacaacaacaacaacaacgccgcctgtgggtcaag

SEQ ID NO: 26992 - DNA, 291 bp, Glycine max
  Clone ID: 701096901H1
ctgaaccggaccggttcggcttggagagatcttgttgggctcggaaacacgcatttgcggcggtgatgagagggagctgctgctgctggaaccgtcggacagagcagcggttccgcctcctcgcgatctcaacggttaaatcactcaagatcaagcttctcctcttttgctgcgtcgccttcacgcttctcgccttttccaccagcgcttcttccttcgtcctatggatcaacaaccaaacgccgccgcctccgccacctcgcttccccgattccgggaaagggtattcta

SEQ ID NO: 26993 - DNA, 289 bp, Glycine max
  Clone ID: 701096902H1
caactccaccctctctccttcttacctccttgaccatgatgagtttcgccatggattcagtttcggtgttaaaccctaaactctcgcactcccattcctctctcccattcagaaggttcccccattccctcaacttccaccccttactcaaaccccgcgcagttaacgccgccgtcccccctaacggcctcgccgcctgcttcctcaccctccaccgacggaaaccgttaaccgtcgctttcacagcttctcaccaagactcggaacacagagagattgaagtggagaa

SEQ ID NO: 26994 - DNA, 286 bp, Glycine max
  Clone ID: 701096903H1
catatttctgtgccaacaaaagaagatggcctcacaggtttgcaaagctgcttccagagccgcgaggtcccttctctccgcttccagagcctcccatggacgtgcggttggggctgctacggctgtttcattgagctgcaaagtgcctcttttctacggaaagaacggttctggaagtggttccgcttcatcatcatcatcatcatggatttcaggagcacttgctcttcctgccgcagcttacatgttccaagatcaggaggtgcgcgcacttgagctggagcgc

SEQ ID NO: 26995 - DNA, 281 bp, Glycine max
  Clone ID: 701096904H1
agtatctgtgccccaaccccacttgcttttctgcatttctttttatccttctgtgtactctgtattctaatcacatgcttcttaatcactttctcaattccattgctccctctctaccctgagttctggaccttgtcatagattctctcagattttcgctcttcctggtatcttcagaatgctttctgtgagggatttttggaggcggcataggtagaaggttctcgtcactcgtcgtgttttaggaagtgggtatcttgtgtataagctctacggtgctc

SEQ ID NO: 26996 - DNA, 283 bp, Glycine max
  Clone ID: 701096905H1
gtttgattatgtctttgactggaccattttgaagtatcagcaatcacagctagccactcctccaacacgggccattggtcctagtgctggaaccagttctggaatgcccccggctgttactaatgctgataggcatacaggaggggaagaagggcgacctcctgctttggtttcagtggattcctcgaggcggagaatgtcagggcccattttaaatactttatcaagtgccaatgtcttgggtcagtcaagtggatcatctaggcgggctgctgtttctagt

SEQ ID NO: 26997 - DNA, 277 bp, Glycine max
  Clone ID: 701096906H1
atctatctttgcttccccttagtcaaacacagtaacacaccatccatcctctatctcttctcttcttctgtgctctagcttcctgctcctgtttctgagaatccgtacgggctaatcaacacaacaaaatggatgcaattagttgcctggatgagagcaccaccaccgagtcactctccataagtcaggcgatacttcttcgacgattatgtcgtccgagaaggcttctccttccccgtcgtcggcgaacaggctgtgcagcgtcggtagcggtgct

SEQ ID NO: 26998 - DNA, 288 bp, Glycine max
  Clone ID: 701096907H1
catcctcccaaaatcatataattctctttcatctgaattctccctttcaaatctcttcctctgacgtgttcgtagttctctgcatcatcgagcatgcaacgcgtcttcgagtttcctcaaactcacatggatcggcgcccgagacagagagcgagattgggctgggaccatccctgaggtccccaaggctcaggtaggattgtcttgtggacaagatgttgggactatttcaagctttgctccttcaaggggtcactcagaaaataccactagttctctatttgttaa

SEQ ID NO: 26999 - DNA, 284 bp, Glycine max
  Clone ID: 701096908H1
tttggccacaaggtggtggatttgctactggaaccatcaacataggagggctagaattgtttcaaatttcaacattcaacaaagtttggacaaccttagaaggtggacaaggtgatgcaggggcagctttctttgagccagcaggaatacctgagggattcttcacactaggccactacagtcaacccaacaacaagcctctttttggatcaattctggtggcaaaagcatgagacatcatcaggtgacaataatggagctttgaagaaaccaattgattacac

SEQ ID NO: 27000 - DNA, 283 bp, Glycine max
  Clone ID: 701096909H1
ctcgagccgtctctatctctcacacacactttctctctctctctctctcacccagatcttgtcagaatggcgagcgctcccactccaggcgaagagttcgtgtacatggcgaactggcggacaggccgagcgctacgaggagatggtggagttcatggagaaggtctccgcctccgccgagagcgaggagctgaccgtggaggagcgtaacctcctctccgtcgcctacaagaacgtgatcggcgctcgccgcgcctcctggcgcatcatctcctcaatcgag

SEQ ID NO: 27001 - DNA, 282 bp, Glycine max
  Clone ID: 701096910H1
attttctattccccaaatctcctccttagactgccaacccaatatagccattggatcgaattcagtttggattcggtctgatggtttgggagttctaataagtctaaggaacagaaattctgtacatatatatttagaagatcacaggtgcttgatcagtggtgtatcaatatggacaaggtgatgaggtttgcctctgaaaagggtgtggtgattttcacaaagagttcttgttgcctctgctatgcagttaacattctgtttcaagaacttggggtgaat

SEQ ID NO: 27002 - DNA, 285 bp, Glycine max
  Clone ID: 701096911H1
atcgatgcaactcaaagccatcctccactacgcgacctctcagattgtccctcaacaatctctttccgagattacaataaccttcgacgtgctccaaagcctccaccgccccgccaacttcctcgtgtttgggctgggccgcgattctcctcatgtgggccagcctcaacccccacggtaccacgctgttcctcgaggaggaccctaaatggttcgggatcgtcaccaaggaggcgccctacctccgggcccacacggtccgttaccggacacagctccgagaag

SEQ ID NO: 27003 - DNA, 284 bp, Glycine max
  Clone ID: 701096912H1
cttcaaccctctagatcgaaaggccaattttctttttcttttagctcttgttatgatttcgcattctttttaccttttcaattcttcaaaaattctcgcgactgaattcacgtcagaacacggaaacataaagttcagttttttgcatcgtttttattaaaatttgttggcgaacaaaacagagaaaaaaaacccaaaaaattgaaatttcttatccgttttggcgaattgaactgcgtgttcaattgggttgttgacttcgaggcagagggaaccgcgggtgt

SEQ ID NO: 27004 - DNA, 281 bp, Glycine max
  Clone ID: 701096913H1
ctcgagccgctcgagccgattcggctcgagccactcctatcgtgctcccatcaatgacgctagctgacaaaccgttaccggtctcatcgaatgcggagatgactgggaattgatcgtccacgatgctcgctttggtaaaacgagactctccgaatcaattgcaaattatgttgctttaacccctaccgaaacaaaggagggagcatcgatatttggatccaaaaaagacactatgtttgaagtggatgctaaaactggagcgcttgttcgaacgcactatg

SEQ ID NO: 27005 - DNA, 285 bp, Glycine max
  Clone ID: 701096914H1
gcaaaagtgctaagtccttgcatcagttctctattgtcttggcttcaaagttcagatcatgctttccttttcatttaagaatatcttagattttgagaacactgctcatgtccagctggaattggagtaaaatgtggacaacgatcacggaccttaaatagaagtacctgttgtttgttgttcaaaaaaagagagaaatcagaaaattcaggagtgtttataccagacaaacattttggtgttatttgcatatattcaaagcaccagttacttttcaaatgcaaa

SEQ ID NO: 27006 - DNA, 250 bp, Glycine max
  Clone ID: 700966880H1
acagaatctactctctttttttctaccttagattccttctccaacaatggctctcgccgtttccactacttcttcctcttcagcagctgctgcagcttctagctccttcttctctcgtctcggacttcctccgacgcaaaagctcctcaaatcggttcgtttcggtttccggagaggtcgcttgtttcgtctgttgttgtcaatgtaactcaacgacgctccttggtgaggccactcaacgccgaaccgc

SEQ ID NO: 27007 - DNA, 251 bp, Glycine max
  Clone ID: 700966881H1
agaaaaccctgaaatgaggttcaacatatctttgtaccgaaataaagagtacaagccttctgatggtgatgactcttctgttccattggaggagttgctggctgatcttgatctgagtgagcacaagatgaagaggataacatgacggaatgaacaaaagcttcttctatcttgattagtattttaaggaattttggttttttgttcatgtcaaaggctcccccctcccatttatgttgtgttattttgca

SEQ ID NO: 27008 - DNA, 251 bp, Glycine max
  Clone ID: 700966882H1
ctttcactagctattacactttttgagggtttttttttttattctactatatatgggggcaagctcgggtatagtactagaaatcacagttatatcatgcgaaaaccttcgtgtcacggaggatccatacgttgtcgttagggctgagtcgttaaattgttgcacctcgaatatagcgaaggattgtgggagcaacaaaacgagtttgttttcgtggaacgagaagttgatgctgaacatgcccatgcatg

SEQ ID NO: 27009 - DNA, 251 bp, Glycine max
  Clone ID: 700966883H1
ctcgagccgcacaaacttcctctgaagcattccacttccatggccgatccaaactccaatcctaaccactctaacgctcacgtgaaccgttccagacactacaccactaacgtgaccttccgtccctctgtcacgcgtcgcgcgtgggcgccatcatcggcaagtccggcgtgctcatcaagtcgctccaggaggccaccggcgccaagatacggatcgtggacgcgccgccggactcccctgaccgagtc

SEQ ID NO: 27010 - DNA, 250 bp, Glycine max
  Clone ID: 700966884H1
caccttcgtaggagccttacctctctctctctctctctctctctctccattccgtagtatccctctgttcgacccttttacttagcattccctgtttccggtattcgctccctttttttttctgattctgtctggttttacttagatctctgtcccgcaccagatctggtgcagggtgagagggttgggttcattaattttgtatcaatcttccttctgagcggtacgcgtggggataccagagtctttt

SEQ ID NO: 27011 - DNA, 251 bp, Glycine max
  Clone ID: 700966885H1
caccttcgtaggagccttacctctctctctctctctctctctctctccattccgtagtatccctctgttcgacccttttacttagcattccctgtttccggtattcgctccctttttttttatgattctgtctggttttacttatatctctgtcccgcaccagatctggtgcagggtgagagggttgggttcattaattttgtatcaatcttccttctgagcggtaggcgtggggataccagagtcttttc

SEQ ID NO: 27012 - DNA, 251 bp, Glycine max
  Clone ID: 700966886H1
ccgatgaaggttgaagacttctttaggtacttattctcagatgatgctctaaattttcttgagtcttttcgccaaaagtgtggtgataaagactttaggtgttctccgtggcatcctcaagagaatttgggtatgctcgtgaactgtcatttcaacatccaataaaaatttatcttggagcgaaatttggtggctgccatgaggtccagaaatttcgtgattataggaacagtcatttggttatcgagacg

SEQ ID NO: 27013 - DNA, 250 bp, Glycine max
  Clone ID: 700966887H1
tgcttttctgttaagcaatcaaatttacaaacccccagagttcttctccccttacttcttcaagggtgctagttatgaatactatggaggagaaccaaaaggatcaaagtcatcatcacatgtatgggttatagttggtgcagtagttgctgttgtggtctttgttgtactggcattctttgcagggaggtatgcccttcgccagaaaacaagagcaagaagatcttcagagttgaacccttttgcaaat

SEQ ID NO: 27014 - DNA, 252 bp, Glycine max
  Clone ID: 700966888H1
agagaaacatttcactaatagagagacataagcataatattgagaaataatggagggttgtacttattgtgtgaagttgctatgccttgttgggtttgtggtgcttgtgagtactattgcaggggtggagagtgctggtgaatgtgggaaatctaccaccccagataatgaggcttataagcttgcaccatgtgcctcagcagcacaagatgagaatgctagtgtttctcagagttgctgtgctcaggtgaa

SEQ ID NO: 27015 - DNA, 250 bp, Glycine max
  Clone ID: 700966889H1
atctaatcactctagctgttgcaaatttctactatttttcaatggcttctgcagatgttgagttccgttgctttgttggtgggcttgcttgggtcaccggcaacgatgccctcgagaaagcctttcaatctacggcgacatcgttgaatcgaaggttatcaacgaccgtgagactggaaggtccagaggattcggatttgtgaccttcgcctcagagcagtcaatgaaagatgcgatcgcaggaatgaac

SEQ ID NO: 27016 - DNA, 247 bp, Glycine max
  Clone ID: 700966890H1
ggaagcctctcgccgacgacaatttcgccgccgatccttcttcctccgacgtcttcagctccgtccagcgccattccgaggaccgccgcctccggctactcaagtctcagatcgccgccgctgagcggctgctgcggaagccacaccgagcagatcgaagcggcattccgacaacgaggaggacggcgatgccgagcctgaagccgaggtgaagaaggcgaacagaagaagccgaagaagccgaagt

SEQ ID NO: 27017 - DNA, 248 bp, Glycine max
  Clone ID: 700966891H1
gctgatgcacccggcgaatcggagggttttccgcaaggacgaaagaggggttgtgagtgcagttcatctcttgaacccttcgttgcaggggttggataagaagtaccctgtttcgttgctcgtttgcttgttcattccaagagttgcaggaagcaaatggtggctgctggagcctgtgtatatacgcagaagcttgttgagatggatgttcccgggtcgaagaaattcttggagagcctcgggcgtgg

SEQ ID NO: 27018 - DNA, 245 bp, Glycine max
  Clone ID: 700966892H1
aactatatttcaaggggaactgctcatttccttacttgcaaagaacccgactatcaacagagtttatggaacatgatttcatctattatgtcagataaaaatatggaggacaatgatattgtgccggctccaaagcttatcgaagttgtcttccagaattgcagaggacaagtcgatcactgggttgagccatatctcagaattacagttgaacgcttgcatcacactgaaaaatcatatttgaa

SEQ ID NO: 27019 - DNA, 250 bp, Glycine max
  Clone ID: 700966893H1
ctttctctctctaaagctgaaacttcgcacagcaacaagacaagcactcagagtgcttcgaattcgtcactgatcacgtttctgcaatgcaccgcgtgggtagtgcaagtaacggaaacaattcaactcgccctcgtaaggagaagagattaacctatgtgttgaatgattctgatgactcaaagcattgtgcaggcataaattgtctggctctacttatgtctgcagcatctgatgggtctgattatct

SEQ ID NO: 27020 - DNA, 249 bp, Glycine max
  Clone ID: 700966895H1
ggcaagaaaaaccaagtccattttcttggccttcttactactatgctctttctcactgggggtagtggtagtagcccaagaggaggcaatagcaaaatccgaaagtgaagcattaggggaacagagaaaagagaaacacttgaaatcatcattggtggaggtggttcacatgatccttctccctctccccctacatattgcccacctcctccaccaaaaccactgagccggttggagaaagcaaaacgt

SEQ ID NO: 27021 - DNA, 250 bp, Glycine max
  Clone ID: 700966896H1
aaagtcatcaaccttctcaaccgcaccggccacgcccgcttccgccgctctccaccccaagcccaagcccaagcccaaacccaaacccaaacccaaacaagtcttcagcctcaaccagaaacccacaagggttcagtttagatttcgtgaagcccaccattctaaactcaaaacccagcaacaaagacgagactttgaccctctccaccacctcctcctcctccttcacgtcctccgtcaccaacgacgc

SEQ ID NO: 27022 - DNA, 251 bp, Glycine max
  Clone ID: 700966879H1
tccaattgcaacatactaagtgggttggctggtttagatctgagcaacagcttttaattttctacttgcttgaattttattggaagccatggattgttcatcatggattaacacttccttggatctcaacattaatccccgcagagttcatgaagaagttcccgtaagtatagaaataaagatcgaataatattatatcattcttcttgcgagcactccctgaagctcttacgggaaatgctttcattcag

SEQ ID NO: 27023 - DNA, 102 bp, Glycine max
  Clone ID: 700966849H1
agggtagaaggctttaaacttcttgtggtatatgtctggagttgctatattttaatttccatgctagacagaattgtggcattttgaaattttgcttaattt

SEQ ID NO: 27024 - DNA, 253 bp, Glycine max
  Clone ID: 700966850H1
cggatctagagtcttcagtttctcctcgttgttcttcgctttcctgttttcaatttcgattctttcgttaatttaataagatgtttgggagggcaccgaagaagagcgataatacgaggtactacgaatcctcggcgtctccaagaacgcttcgcaggatgatctgaagaaggcttacaagaaagccgccattaagaatcaccccgacaagggcggtgatcccgagaagtttaaagagctggcgcaagttatg

SEQ ID NO: 27025 - DNA, 253 bp, Glycine max
  Clone ID: 700966852H1
tcacaatctggacactgctcagattagaaccctaacctaacccaaccctctctctctctctcttcaattcatggacgccgtcgactcaaccccagatccccctcccctccctacctacgatccatcgagtatcacaacccgccgcaacatcaatcggaaaccgggcaaaacggtaacggcaccaacctcggaaaaccatcggagaacggcagtcaggtcgctgccgacaacaacggcttgaatcctcagattt

SEQ ID NO: 27026 - DNA, 253 bp, Glycine max
  Clone ID: 700966853H1
aagggtgttgtagtatagttagagatatcactactacaccaccctgcatagtttgttcagctataatactacttgagcttctttacctacttttcaaacctacattgcacacaaaatggcaacatctggtcatgttatctacttgcattgcttctttttatgtcaactattgtatcagagagtagagtggcaaggaaggacttgggcctggaccttggtgggttgggggttggacttggactgggtttgggcc

SEQ ID NO: 27027 - DNA, 255 bp, Glycine max
  Clone ID: 700966854H1
cggctcgagccttgcttcacttgtatgctttagtttctagcatcgatcactcctaattacttgctagcatttctctactccttgtgcttgacacttttgtcatttaaaatggaacttaattttaagtaccaacttagccttttctgtgtcacactgctcttacctgccctgtgtacctctcaagactcttttacgtgctccagagcaacctattatggtagcccagattgttatggaaatccaaggggagcttgt

SEQ ID NO: 27028 - DNA, 250 bp, Glycine max
  Clone ID: 700966855H1
cctctactaggggtgatggcttttggaagggatgttgtgctggattgtgctgttgctgtgccctggattgttgtctctgattgaagttatggatttgggcttatcctctctgtcctttgtcattttctttactaatttaattttgtacttgtctaataagggtatttgtgtcctccgagacagcaaaattttatttatgtatgtgatggaatttgtatcttgttgatctttttttaactttggataggga

SEQ ID NO: 27029 - DNA, 254 bp, Glycine max
  Clone ID: 700966856H1
gggaagccaaagcgaaaccctaaccctaacggagagatggcggacacttggcatcgatattcgggacggagaaggacagggtgaactgtccgttctacttcaagatcggcgcgtgcaggcacggcgccggtgctcccggcttcacacgaagcccacaattagcccaacgttggttctgtcgaacatgtaccagaggcccgacatgaacatgaacatcatcaccaaccccgatcagccccagccccaatctctcg

SEQ ID NO: 27030 - DNA, 243 bp, Glycine max
  Clone ID: 700966858H1
attactagttagtgctgacaaattggtgctacttatgagtggtaagaacaattttgtgtttagaagttagcatagagtgaaataaacgaatgtccaagttgtgttcttgtgttttagtcttagaaggtatggtaacaggagaaaagcagtggatgtttttttcttttggttcgttaaggatgtaagttacgtcaacggcatttggtatatcttatctgttctcaaaatgattctttagtaagc

SEQ ID NO: 27031 - DNA, 252 bp, Glycine max
  Clone ID: 700966859H1
ctctccctctttcctatcacactttctagatagctagccaaccagagtaagatctaaagatatttcttatatatcctatggtccgagagtgcccttgttctgcgccaaccctttcttccacatctgcgtttcaacctcttcctctcttgagtccccttatcatcaaatacccttcttcttcaacctccaccaaattcaacccccacataacaaatctcctcccatcccatttttcagcaccaaagtttgaaa

SEQ ID NO: 27032 - DNA, 111 bp, Glycine max
  Clone ID: 700966860H1
gcgcgcaacatgtttctctcagacaagcatgttgatgttacctttcttctgttcctatttatgtttgaaattggatcatcttcagcagcacccgtttacaacgctaattac

SEQ ID NO: 27033 - DNA, 252 bp, Glycine max
  Clone ID: 700966861H1
atccatcgaaggcaaggaatggcgaagaagaacaagaagcaggcaacagagggcgaggtggaaccggaactcaacaccaacaatgacgacagcgatgattctcacaataagaagaaacttgagaaaagaataagaagatgaaaatacccacagttagcatagccgtgcctggttccatcattgacaacgttccaagtctcgagctcgctacccggttggctggtcagatcgctcgtgccgcaaccattttcc

SEQ ID NO: 27034 - DNA, 250 bp, Glycine max
  Clone ID: 700966863H1
tgtttgtgtagaagatgaaaagggaacagcaagagggatgccgagctttgattcacaattgcccaattccaatgcatgctatacagagggaagcgcaattgattctttttgtgtgtttgactttgatcaatcagttggatatcgcatagaggattgtgttgccttgaggggaaactcagtttttgactcactaaaagtaagtagccaaacaatttctcggggtcctgttgaagttgattcctttgataag

SEQ ID NO: 27035 - DNA, 250 bp, Glycine max
  Clone ID: 700966864H1
actcgagccgaatcggctcgagcaaaactttcatctttgtcatccaattaacccaggtgtaaaaatgtcagcagtgaacatgtccactatgagacttccaagagcttccttgtctggaacaacacagctaggagatcatgtgctcttacaaagagtccatcatctttgaggtctgtgaagaatgtgtctaaagtgtttggattgaaatcatcttcctttagagtgtcagcaatggcggtatataaagtga

SEQ ID NO: 27036 - DNA, 252 bp, Glycine max
  Clone ID: 700966865H1
ctgggacatcccaagctgactgtgctgttcttatcattgattcgaccactggtggttttgaagctggtatttccaaggatggacagactcgtgaacatgctctgctttcattcacccttggtgtgaacagatgatttgctgctgtaacaaaatggatgctactacacccaagtattccaaggccaggtatgatgaaattgtgaaggaagtctcttcctacttgaagaaagtaggatacaaccctgacaagat

SEQ ID NO: 27037 - DNA, 252 bp, Glycine max
  Clone ID: 700966866H1
gctgtatccacttttgcggcctttgttgggcaagttttagtgagaaagctggttgccatactagggagagcatcgctgatcatttttatcctctccagcaccatttttgtcagtgcaatatcactggtggtgtgggcatatcaaacatgatccaaagaattgcaaataaagagtacatggggtttgaaaacctttgtacctactcagcctagatattagaattcggattacaaattcaatttcaaggactat

SEQ ID NO: 27038 - DNA, 252 bp, Glycine max
  Clone ID: 700966867H1
accacacaattcctacacatttctactctttagtttctccaattttctttctcaattctcaacaatggccactacaacacaacttcacttaccccctggattcagattccatccaacagatgaagactcgtcatccactacctttgtcgcaaatgcgcttcgcaacatatcgcggttcccataatcgccgaaattgatctgtacaagtacgacccttgggaccttccaggaatggctttgtacggagagaaa

SEQ ID NO: 27039 - DNA, 118 bp, Glycine max
  Clone ID: 700966869H1
gaaaaagaaaaagaaaaagcatacaacgatggctatgaatggatcacctcgacggtgggacgtgagattagttttgacattttctctacttttaatctcagcctctgtttctgctctt

SEQ ID NO: 27040 - DNA, 254 bp, Glycine max
  Clone ID: 700966870H1
gagaaaaactcaaagtcatcatcatctaccatggcaaattctgtggcattttccgacgagattcctaacatgagcatgagcttccctttctcccctgctttctctagtagcatctttgacatgatgccaccaccaccaccttcctcatctcacgatcctaaagctcccaactttgctaatagcttcatggacttgctcgctgtccctgctgattattataccccttctttattcgactggtcccaaaacaccgc

SEQ ID NO: 27041 - DNA, 253 bp, Glycine max
  Clone ID: 700966871H1
gtcatcttctggtgtacctgcaagtattgcactttcagcttccaagtcaattcacaaagctcctacaattatatggacacatagttctgtggattctcctatcttacatcataagcatcacttttcaaaagaaagttctccaatccaactccagtggcagcgccaacctatccagtccaggctcctacatacagtcatcaaggtccttcagtcttcgaatcacaacctcctttctcctcaccaaatattaagg

SEQ ID NO: 27042 - DNA, 253 bp, Glycine max
  Clone ID: 700966872H1
ctttcatagctactacactactttatcactttcattctttaattgggttcaaagaagcttaattaattggttgcagagattgaaaattaggaaaatggtgagtgttgaagagattcgtaaggcacacgtgcggaaggccctgccaccgtgatggctattggcacggccactcctcccaactgcgtagaccagagtacctatcctgactattatttcaggatcaccaacagtgatcacatgaccgagctcaaag

SEQ ID NO: 27043 - DNA, 254 bp, Glycine max
  Clone ID: 700966873H1
cttgtatgtggctgcagatatgcaagccttaaattcggtcctcgaatcatttctgatcattggttgtttgttattctgtcaaatacattccaaaatctcttggaaattgcgagattcagtgcttatcctagcagcagattttgggttctgacccaattattcattttccccaactgggtcttgtggattttttgttggggttttaaatttcgtgttgctgggtttgaaagttatttcctttcttccccgtctgg

SEQ ID NO: 27044 - DNA, 251 bp, Glycine max
  Clone ID: 700966874H1
aggttgacttagcatttgcttatttataaatgtcattgtgtttggaataatggtaataattaaaacatgtggttgattacttacaatttcccaggtatatataaaatagaacaaaattaaaggatgggaatagtactacaagaatcagaacttttccctagtggtaaaagcttctctacacctgcactctattattaatttctcatgcatgctaaaatctagtgcgataaagaacaggccatgtgtgaggt

SEQ ID NO: 27045 - DNA, 252 bp, Glycine max
  Clone ID: 700966875H1
aatcgagccgaatcggctcgagcgagctcgaggttcaacagcatcttgcgatgctagctcctctgtgctgcaaaaagggtctgaaacttgttcagaaatctccttaccacagtacaagttgtctatgattctgtcccagttgtggataataatgaaggcgggaggtaatctcttagtaggtccaactctttgaaggataagaaaccatggaagaaaggtcaattatcacaccatcaggtttctgtacaatct

SEQ ID NO: 27046 - DNA, 104 bp, Glycine max
  Clone ID: 700966876H1
acgagagatttcgttgtgcttagaactgttagatcttattatcatcgttgtttgcactgaacaatgggggcaccgaaacctgtatagttacaatatttttgttg

SEQ ID NO: 27047 - DNA, 240 bp, Glycine max
  Clone ID: 700966877H1
actacattaatattcccttgggtttcattaattgtgacatttagctttttttattgaaccgtgtcaatggccgctactatgaaggctttagcttttgttgctttgcttgttaccattaatgcatagtgtgtgaaagtagagtggcgagaaaggaccttggattggaccttggtggggtgggaattggggtgggtgctggggttggactaggccttggtggtgggggtggtgctggttctg

SEQ ID NO: 27048 - DNA, 252 bp, Glycine max
  Clone ID: 700966848H1
gccaagggcttcgcaaggtgaagccttaccttgctatattgtcccttcagtttggctactcagggatgtatatcatcactatggtttctttcaagcatggcatgagtcattggatactctcagtgaccgtcatgtagttgctgctattataatagtcccttttgcacttgtccttgaaagaaaaataagaccaaagatgactcttcccatcttcctgaggatagtggcacttggtttccttgagccagtgct

SEQ ID NO: 27049 - DNA, 248 bp, Glycine max
  Clone ID: 700966878H1
aagaaatttaagtgaggagctagagaatgatgatgaagtctgctatgtgtgcagtggtggttgtagcacttcttcttctggcggaggtgggacccatggctgaggctgtgacatgcaccccacagagttgagtccgtgtcttccagcaatcacttccggtgctaaaccttccaatgcttgttgcacgaagctgaagcagcaaaaaccatgcttatgtggctacctcaaaaacgctagcttgaagcagt

SEQ ID NO: 27050 - DNA, 255 bp, Glycine max
  Clone ID: 700966819H1
aggaagtgcaagagattatggttaccaaaagatataattcaagtttttaaagacaacaccggaactagtaaaattgaaatcatatgcctggattcctccatatctgacaaagaagaaacagtggaatgaatgaaaacgccttcatgaagatggaaaaccttaaaatacttattattagaaatgacaaattttccaaaggtcccaattattttccagaaggtttgagagtactggaatggcacagatatccttcaa

SEQ ID NO: 27051 - DNA, 254 bp, Glycine max
  Clone ID: 700966820H1
ctcagccatatccccatcgcaacttttctgaggaagttgctattcttgatggctactttggcaaacttggtgcaggaagcaatgcttatattttgggtggccaagacaaagcacagaactggcatgttactctgcttctgcagattctgtaactcaatgtgacaatgtttacactcttgagatgtgcatgactggcctggatagagagaaagcacaggttttctacaaagaacaatctgcttcagctgccatga

SEQ ID NO: 27052 - DNA, 255 bp, Glycine max
  Clone ID: 700966821H1
agagaagagggtagcaatattacaggaatggtttgaccgcgttgactcggagaaaagtggaagcataacagcggtgcagctaaagacagctcttgctgtgggcaacctggaatttccgctctcagtggtcagcaaatgatcaggatgtacgatttcgaccggaatggtactatgagctttcaagaatttgtttcactcaacaacttccttcttaaggttcaacatgcattttctgatctagagaggggtcgtggt

SEQ ID NO: 27053 - DNA, 68 bp, Glycine max
  Clone ID: 700966822H1
gctgtctctcccatcctttcgcattctcaatacccttttgatttgtgaaaggaaagcaaacatggttg

SEQ ID NO: 27054 - DNA, 255 bp, Glycine max
  Clone ID: 700966823H1
gaaagacacagccattgtttgtttactttccattgattgagcgaaagctttgttttttctgcgatcattttccattgggtggaagaaagtctcaacctttagtcgaaagagcaaggatctgagtgagtgagcgatcatgtgtggtggtgcgattatctccgacttcattccagcgggtcccgccggcggggcgcacgcgtgaccgccgacatcctgtggccgaatttgaggaagcggttctcgaagtcgctgctg

SEQ ID NO: 27055 - DNA, 255 bp, Glycine max
  Clone ID: 700966824H1
caaagggcactttgtttcccatgtgtggaatgaacttggcctttgatcgtgatctcataggagcagcaatgtactttggtctcatgggtgatggtcagcctattggacgctacgacgacatgtgggctgctggtgctgcaaggtaatctgtgatcacttgggattgggaatcaagactggtctgccctatatctatcacagcaaggccagcaacccatttgtgaacttgaagaaagagtacaaaggcatattctg

SEQ ID NO: 27056 - DNA, 255 bp, Glycine max
  Clone ID: 700966825H1
actcgagccgattcggctcgagtccatggccactttcttcacccaaacctccttcccctcccactctctctccaaaaccttcgatacccatttcgccccatccccgaaagtcaacgtatttgcgaacttgccggcgaggaggcacgtgggggttcgagtttcgaacgcgctgatcgaaccagacggagggaagctggtggagcttgtggtgagggataattcagaaagagacttgaagaagggtgaggctctttc

SEQ ID NO: 27057 - DNA, 253 bp, Glycine max
  Clone ID: 700966826H1
atccctagcatgaacaagccgaggaagatgtgctctggggtatttatggatggaaagttttatgttattggtggaattggtggaaaagattctaagcttcttacatgtggtgaggagtacaatataaaactagaacatggacagaaattcctaacatgtcccctggacgcagtgccaggggagctgaaatgcctgcaacagctgaggcgccacctctggttgccgttgtaaatgatgaattatatgctgctga

SEQ ID NO: 27058 - DNA, 80 bp, Glycine max
  Clone ID: 700966828H1
atgaatttgaaaacagacccaggactagaaataatgagtcaacgttttcagtttttcaaaagaagtaaaaatgcagtgat

SEQ ID NO: 27059 - DNA, 253 bp, Glycine max
  Clone ID: 700966829H1
cagccagccgttagggaaatcaagcacagctcaatcattgaatcttagcataaacacatacagaagaaggaaaagtggcaccctgggaggagctgatattgaaggagggtttggaagaaaaagaatttgttttgagatatatatacatatatgtgcaagtgcataggaaattaacacaaaaagatgacatggtgcaatgactctgatgaggatagggttattgaatcaacgacgccaacaataactattactc

SEQ ID NO: 27060 - DNA, 253 bp, Glycine max
  Clone ID: 700966830H1
cctaattgaatccaagcaagcaagggaagtgggggtattatttgatcagaagtacaaagctcttcaaaacccaaacaacagctccacggaccacccctactgctctgctctgcaatggccgacgagaacctgttgatcagaagagatatcttgaagagtcttgcaaaccaaaatgtgtaaaaccattactggaataccaggcgtgcattaaaaggatacatggtgatgattctgggcagaaacactgcactgg

SEQ ID NO: 27061 - DNA, 244 bp, Glycine max
  Clone ID: 700966831H1
aacaccgaaagtacatgttttattatagggtacactagtgagctgctagttcttattcactaggaagttacaagacaatacaacaaacatgtagtcacagtttgtagtagctaacatcatagtgcatttacgccctgtcatctttgttttcagcaacaaccttaactctttcaaggcagagtgtaaggtccacacttgtaaccaacagggcgattagccaggttacaacgcttggggatggtga

SEQ ID NO: 27062 - DNA, 256 bp, Glycine max
  Clone ID: 700966833H1
gttgttgttttcagataaacacgtgactcactatctatctatcaatcgatatctccgagttcagccgaaccaaactccgaagctatggcagagctccaaaccaaggttgaacctgttacggtcccggcccggtggatcccgagccaccgctagctgaggctccgccgctcgagaagaaagcagtggcggtgccaccacctgttccggctgcggcagaggaaaccaaagctcttgttattgtggagaaggagaagga

SEQ ID NO: 27063 - DNA, 255 bp, Glycine max
  Clone ID: 700966834H1
atattaatttactgaacagtgacaagttaaaaccaacatactaaatgtacaatgtatgatatccacctaaatggttaaaagaatgacttctgtaacaatcccagttgcataggtaacttatgtgacatgatgcaacggattgatgtattaacagattagtgtggagctgtggacccttctttaacgtgttgctaccatatggctgtaattgttggtgtttcaccattttcttgagctgttgtgatactaagattc

SEQ ID NO: 27064 - DNA, 252 bp, Glycine max
  Clone ID: 700966835H1
tccaattgtaagatgcagtctagcatcgcagggttacaccgtcccgagtgttcttatatttgactgtttgattcattcatatcacatttatttcctttcttggtgctggtttggcttttgatctagctcatgtgtagctataatcatgtgtttcagtcatcctcagtttgtttattgaaaataagaaacgaaacttgctctttcaatatgtatttaggagaataaagttattttagaacatgaagtgcctgc

SEQ ID NO: 27065 - DNA, 189 bp, Glycine max
  Clone ID: 700966836H1
aaaacaccaattctccaccctctcattgaaaaaaaaacaaccaaacaaaaaaaatcaatcattttattttatttttctacgaaaatggttgatttacattggaaatcaaagatgcctagttccaaaaaccaaaactctctctctccgacaacaagtccttaccctctttgcaactacccttccgcacca

SEQ ID NO: 27066 - DNA, 254 bp, Glycine max
  Clone ID: 700966837H1
tgccactgccgctgcaggcatagcttccttgttttcttcttctattaacagtgtcaaatgtcttcgttcctccaagaactgctccattatagacccccttataaccacagtgccctcaaaccgtggcatgttgtgtcacacttggtggaacctttgtccattgggggtgccattaattcgcacaagttgtgggggcctagaatttctgctgctgttgcacaagaagaggctgttgttgtggctgatgatgaggt

SEQ ID NO: 27067 - DNA, 254 bp, Glycine max
  Clone ID: 700966838H1
agtcttcaatactgatgattattgctgcagagggacttatggaaaccctgcaacatgtttggcttcaaactactccaagatcttcaaacaagtgtgccctgcagcatatagttttgcacttgatgaccaacaagtctaataacttgttcaaaagcagactttgttgtgatattctgtggatcaaggaatcagacagcttgttcctatcaagacaagcaggttgtatgtaatcgaccaaataaagcctataaagc

SEQ ID NO: 27068 - DNA, 254 bp, Glycine max
  Clone ID: 700966839H1
caataacaacatgcgtggtccttcggcagattgggcccaggcccaggcccaaagaattgataacaatgatggaggacttttggggtctcttactggtgccaccttaaactacagaagcaatattgtttcggatcagcgagtcaaggttactaataattcggattttcatggagaaaaaggaccggaatgtgttgtggctgtacgaagcgaaggtatggtcgaatcgtggattaattgttcttctgattgagagc

SEQ ID NO: 27069 - DNA, 254 bp, Glycine max
  Clone ID: 700966840H1
tggaagttgtgctagagtctccaagggtggcaccacacagatgagatttcagcctcgtctcgggaggtaccttgcttcagcggcagagaatattgtgtctatttttgatgtggagacacaagtgtgtgatattcactaaagggacacacaaaaccggtggtttgtgtgtgttgggacccttctggggagttgctggcatctgtgagtgaggactctgtcagggtttggactcttggatcagggagtgatgggga

SEQ ID NO: 27070 - DNA, 251 bp, Glycine max
  Clone ID: 700966841H1
gaaaccccaatttcagtaagtatgtgaggttcaacactatgcaagccgttgtccttgatgtgctcttgattttccctgacctccttgaaagagggtttaatcccaaagatgggttgggattggatttataatgagtttggatagcactgtgtttttgttcctcttggtgtgcttgatttatggttcttcttcttgcttgctgggtcaaatccccagattacccattgttgctgaggcagctgataggcaag

SEQ ID NO: 27071 - DNA, 255 bp, Glycine max
  Clone ID: 700966842H1
aatcttcatcatgcacaagagctcttcagattccacgttgggcccgggtggcctggacctctcccaggccttcttcaggcccataaacaacgccgcccctccctccccgaccaagcgccacaacaagatctccgtcatcggcgccggcaacgtgggaatggccatcgcgcagaccatcctcactcaggacctcaccgacgagctcgtcctcgtcgacaccaactccgacaagctccgcggcgagatgctcgacct

SEQ ID NO: 27072 - DNA, 251 bp, Glycine max
  Clone ID: 700966843H1
atatcttccaagtgcaacaccgggaccattagttaagtatagagaagaagagttgaagattttaagaggagatggaacgggagagcgcaaggaacatgaaaggatctatgattatgatgtctacaagatttgggtaatccagatgaagatgtaaagcttgctcgtccagttcttggaggctccagcacctatccttatcctcgtagggttagaactggtagaaaagccaccaagaaagatcctaaaagcga

SEQ ID NO: 27073 - DNA, 112 bp, Glycine max
  Clone ID: 700966845H1
ggcgatgactgcctccaaggatcgcgagaacttcgtctacatcgccaaactcgccgagcaggccgagcgttacgaagagatggtggaatcaatgaagaacgttgcgaatctc

SEQ ID NO: 27074 - DNA, 246 bp, Glycine max
  Clone ID: 700966846H1
gacatggctggcagcaaccaagtcaatctcaatgaatctaggagtgttgttcctttaaatacatgggtgcttatctccaatttcaagttgtcttacaagcttctcagacgtgacgatggaacgtcaatcgtgagttggcggagtatctcgataggaaggtccccgcaaacgcaattcccgttgaaggtgtgttttcaatcgatcacgttgatagaaacgcgggtttattctaccgtgtgtacttac

SEQ ID NO: 27075 - DNA, 250 bp, Glycine max
  Clone ID: 700966847H1
aaggaatcacacaagagaaattttgggtggatcttggtaatttaaatttggtccaaaaatagtaagaaaaaaaaaccatagttcatttaattttcatgtccttgctaacggtggcgcaccaaagtgggtcaggtgagtttatccggttcacggaaagtcatggcggtggtggcgatgacgtcagtggtgacggtgaacatggttgtggacatgatgatggaagtggtgctggaggttcactagggttgaa

SEQ ID NO: 27076 - DNA, 256 bp, Glycine max
  Clone ID: 700966818H1
ctctgcatctgactcctatagtttcctctgctaattccatatccccgttttccttcactcttgaaccccgattcatttccaccagcacaagaagcatggctgcaatatcaataccttctcacatgaaagcttggacatactctgagtatggaaaatccaaggaagttctcaagtttaatcagagtgtggctttgcctgaggtgaaggaagaccaggtcctcatcaaggtcgctgctgcttcccttaaccccattga

SEQ ID NO: 27077 - DNA, 263 bp, Glycine max
  Clone ID: 700966782H1
gtagaagagaaggttcctttggaacacttatttctatttcagtataccgggtctctttctttcatttcaaaaaatttatagaatttcgattttgaaatgaaagaaaagtgtggggataaatataaatgacaaaaagatattggaacataatcttggaagagatgatggaagcaggagttcattttggccacggtactagaaaatggaatcctaaaatgtcaccttagatatctgcaaagcgtaagggtattcatattataaat

SEQ ID NO: 27078 - DNA, 260 bp, Glycine max
  Clone ID: 700966783H1
gccacgagtgttggtgagaagaatgtgttgatttttgaccttggtggtgggacatttgatgtgtctttactcaccattgaggagggtatctttgaggtgaaagccactgctggtgacacccatcttggaggtgaagattttgataacaggatggtgaaccactttgttcaagagttcaagagaaagaacaagaaggacattagtggaaaccccagagcacttagaaggttgaggactgcttgtgagagggccaagagaac

SEQ ID NO: 27079 - DNA, 260 bp, Glycine max
  Clone ID: 700966784H1
gggctgatgagtgatggttgttgatttgattgagaagagaaagagaaagtaatcagaagaattggagtgagtgagaagaaagaaatgggttggggaaggggaatgttggaaggggtggtggtggtgggatgtctgtgtttactgggttgggcgggtctgtggtttttgaaccgtcgactctacaaagagtacgaagagaaacgcgtcctcgtccaaatcatcttcagcgtcgtctttgccttctcctgcaatcttctcca

SEQ ID NO: 27080 - DNA, 261 bp, Glycine max
  Clone ID: 700966786H1
cagctccaagctggaggatctaccagcagtggccctttgcagggagcggtgtggtttccttgacgaagcaattcaccagcgctacgcactggccgcagctcacatggcctacatcaactccctcaaggcaattggtcactccttacaccttttcattcagcaagacatggatgctcctccctctccctctccctccccctccccttctccccctcacaaaccctccaaacacgcctcttcttctcactccgactccgccgg

SEQ ID NO: 27081 - DNA, 262 bp, Glycine max
  Clone ID: 700966788H1
agaaatggcaatggtctgagagatgcagatgtgatgtcaagggtgaactcgctatactgtcttctgcagaaggatccttctacagcagaagacacagacacaatgaccagaaatggcaatggtcttgatgcagatgagggtggaaaagttggtgtcagtaactctaacaccactgaattgtcagcatgcaaaattaaagtgcctgatttggaagttcaaccggatgatgcttctggctgcaagcagggggttagtggtatgt

SEQ ID NO: 27082 - DNA, 261 bp, Glycine max
  Clone ID: 700966789H1
gcacaaccacaacaatctgttgtaactaaggtcacacagcacatgcagattcctcttacatatgcagatgctgttataggagcatcgggcacaaatatcagctatatacgtcgtgctagtggagcaagtattacaattcaggaaacaaggggtgtgccaggggagatgactgttgagataagtgggacttcttctcaaatacaggcagcccagcagctggttcagaatttcatggctgaagctgcaagtgcgacacaggat

SEQ ID NO: 27083 - DNA, 262 bp, Glycine max
  Clone ID: 700966790H1
ttctcgagccgaatcggctcgagcttcctctcatcctctataaagaaactgcttaatttgtgttagttacttggttcagtttccatggattgggggcttgctatatcttctcatcctaaaccttattcagtcacaactggtggaaatctctggcggagtaaacacaccaccaagaatatttactttgcaagttcttggatatcaaaagcttcacgacacaaaagggaaactcaaatagaacataatgttttgaggttccaac

SEQ ID NO: 27084 - DNA, 262 bp, Glycine max
  Clone ID: 700966791H1
cggctcgagccaattcctatcgcggaaataaaaccaaaaaaacttgttatttctgccatgctgtcctaaccgccatggcgccaccattcgcaacccaccacgccacagttattcgttggcattttttcaaaaaaccgccacatctttccgccatggctgtcatttgacaacactggtgaagaatagttcaagtgggctactaaattgcattggttatgattttgatattcagtatagaccaggaaaggagaatatagtggct

SEQ ID NO: 27085 - DNA, 262 bp, Glycine max; identical to SEQ ID NO: 23444
  Clone ID: 700966793H1

SEQ ID NO: 27086 - DNA, 263 bp, Glycine max
  Clone ID: 700966794H1
caacaccaacatgaagagcatggtgacgccattgacgagggtcttaccctttcgtcacccaaatggctataatacccttcccttctctcttacacgctacccttcctcaccgaacttctccttctccttctcccctctcactctcaatctttccatggccgcttcaccacaatcctccgctccgactgtgtcgcctggtgatgctaacatcaacaaagatggtgtatttcaattgattcaagcacatcaggaaaaagctgcta

SEQ ID NO: 27087 - DNA, 262 bp, Glycine max
  Clone ID: 700966795H1
taacgcactcttctaaacttaacacaatggagcttagcaaattgacgttagagatcttctcaaaattggagcagcaatggctctcgcactacgaagcatcaaccaaaacgcgcattctcagcattgacggcggaggaaccaccgccattgtcgccggcgcttccctcgtccacctcgaggaccagatccgcgcccaaacctccgatcctcacgcgcaaatcactgatgactttgacatcatcgccggcaccggcattggcgc

SEQ ID NO: 27088 - DNA, 259 bp, Glycine max
  Clone ID: 700966801H1
gtgcaaaaaaacagaaattaaacactactagtagctagctagggtgagaaaatgggtgaagctaaggaaatatggtctgcaccaataacccctagaacagcttcagtagtaggaacacctgttgtagcattccacctgtgtcatgtccaccctctcagcttcactcaccatctctaacaaggtcacctctacttcaccctgaggatggagatgcaccacgtcgtaaaacatctaagactccaaagactccaagaacccc

SEQ ID NO: 27089 - DNA, 256 bp, Glycine max
  Clone ID: 700966802H1
gctgtaagcaatgttctaccccttgttgcaacagcttttcggccaccgagtggagtgaagcttagatgtccacatgcaattgttgctgcaagggctgcccttgcccgtacaacctttgtgaaaaacatggccctcagcctcttcctgcaaaaatgcttgttattgcagcgttaggcatggcggttaatgtgccctttggcatgtggaaggagcataccaagaaattttcattatcttggtttgtagccgtgcatgc

SEQ ID NO: 27090 - DNA, 255 bp, Glycine max
  Clone ID: 700966804H1
atgatattgattttccaagaggtcatatagcacttaagagtttcaatgcagaggtagttgatgaagcagggaaccctgtgcctcttcatgaaacttatctccaccactgggttgttggaagatactataacctaaatatgtgacgacacacacaaactatgatggacataggatacttcacaactctgaccatatatttgtgaggaacagcggcatatgccagagagatattctaggacaatactatggccttgg

SEQ ID NO: 27091 - DNA, 256 bp, Glycine max
  Clone ID: 700966805H1
tgagaatggagtttcaagggttaccggaaggttgcattgctagtatactctctcgcactacgccggcggacgtgtgtaggttttccgtcgtatcaaagattttccgttcggccgctgaatcggacgctggtggaaacgttttctcccttccgattaccattccatcatttcccagtctccttcgcctctcaactatccttccaagaaggagctctatctcgctctctcggatcgccctatcatcatcgatcagggt

SEQ ID NO: 27092 - DNA, 261 bp, Glycine max
  Clone ID: 700966807H1
aagggcaaaattggagattaaaagggctgatggcaaagaagctaacattgctgaagaagtttttgagagaacaaaggaaaaattccgaatgtattaattgaatctctatgtttcctaagacattaggtatttacacctcaggaaatttgacttcatataaataagctcgatgctatggtgtatcctaaatcctaatgaataaattgtactgggagcatcaaaatgaaagttactttgtaatataagatggcattctgttat

SEQ ID NO: 27093 - DNA, 256 bp, Glycine max
  Clone ID: 700966808H1
ggcacaattggagattaaaagggatgatggcaaagaagctaacattgctgaagaagtttttgagagaacaaaggaaaaattccggatgtattaattgaatctctatgtttcctaagccattaggtatttaacctcaggaaatttgacttcatataaataagctcgatgatatggtgtatcctagatcctaatgaataaattgtactgggagcatcaaaatgaaagttactttgtaatataagatggcattctgtta

SEQ ID NO: 27094 - DNA, 253 bp, Glycine max
  Clone ID: 700966809H1
atcttgttgacatacatgttcctgatggaaaacattttactgtttgtggtgatgtgcatggtcagtactatgatcttctgaatatttttgagcttaatgggcttccttcagaagagaatccgtatctattaatggtgactttgtggataggggatccttttcattggaagttatcctcactttgtttgcatttaagtgcatgtctccatcagccatatatttagccagaggaaatcatgagagcaagagcatg

SEQ ID NO: 27095 - DNA, 255 bp, Glycine max
  Clone ID: 700966810H1
cacaagcacaagcacaagcacttctctaattccctttcacactctattacagatttcacaagtgcttacacttcaaatggctttggaagctcttcaatcacccaccacatccactccatcgtttattcctttgaagaaaccagtctcagttacttagagacaccgtggacgaaaggaaagcgttctaagcgtagcagcacggagcaacaactgcaacacccttcatgcaccgaggaagagtacctcactctttgt

SEQ ID NO: 27096 - DNA, 114 bp, Glycine max
  Clone ID: 700966811H1
aaaattaatcatcttacttatttattctccgaaaatggttgatttacattggaaatcaaagatgccaagttccgacatgccttccagaactctaaaactctctctctccgacaa

SEQ ID NO: 27097 - DNA, 253 bp, Glycine max
  Clone ID: 700966812H1
gagcaattcacggttgggatgcacaaaccccaacaacaacaacaacaacaacaacaacctcagcttcatcaaaacatgcgtatggactatgctgctgacggcactgctgttttcgcccctccgaccgtaccgttaacattaacggcggagattcctctccagcggtgcctccgggcctgggcctgccccagccccagcccatgatggttaactcccccgaaccaattaagagaaagaggggaaggcccaggaa

SEQ ID NO: 27098 - DNA, 141 bp, Glycine max
  Clone ID: 700966813H1
ggctcgagtggaaatcaaaaccgccaagacacgcaagggcaagcgggacctcgagaagcgcgcccccaagctcgtggaatcggggaagaagacgctgatcctgcacggaacgagaccagcggcgtgctgaacgccgtgctc

SEQ ID NO: 27099 - DNA, 261 bp, Glycine max
  Clone ID: 700966814H1
acgtcgagctcgagccgtggtagtaaagttagcgtacacgcaagtaactcccttccgtaattaacataaacacagaatccaagaggtattgcaactggaattccatggcgacgagtgggtcagagacaaagcaatgatggtgattggaatcgacgacagtgatttcagcacgtacgctctccaatggactctggatcacttgctatcccctgcaaatgttcctaagttcaagatttttcttgtttatgccaagccttctgt

SEQ ID NO: 27100 - DNA, 255 bp, Glycine max
  Clone ID: 700966817H1
tgactgttgatttctttcggaagcttcctcaagatgttgataagggtggcaatcccacacattcaatttttgatagatataatgattcatatctaaggcgaattggaaccacaattttgtcatatgtcatatggtctgtgctacactgcggaattcaattcccaagtccatcgtctattgtcaagtgcgggaggcaaaacgaagtctacttgatcacttttttaccgagctaggcaaaatggagaccaagcgtct

SEQ ID NO: 27101 - DNA, 259 bp, Glycine max
  Clone ID: 700966781H1
ggagttgaaagaaagaaaggaaggatgggagtgacaccgaaaattgctccttcgatgctctcttccgacttcgccaatttggcttccgaggctcagcgcatgctccacttcggcgccgattggctccacatggacatcatggatgggcattttgtccccaatttaactattggcgctccagttattgaaagtttgagaaagcacacaaagggatatttggattgtcaccttatggttacaaatcctcttgattatgttg

SEQ ID NO: 27102 - DNA, 261 bp, Glycine max
  Clone ID: 700966746H1
gaatctcgctgggatgaattagttggagaaatgcccctaaaaatatcttatcctgcaatagagagccatgagtggcgaattgttactggttgtgatcccaaaaataccagatggagttaccataatggaggatcttggccagtgctcctgtggctagtaacagctgcttgtatcaaaacggggagaccacagattgcaagacgtgcaattgaacttgccgagagtcgtttactgaaggatgggtggccagagtattatgat

SEQ ID NO: 27103 - DNA, 265 bp, Glycine max
  Clone ID: 700966747H1
gtctcaaaggcccacggttcctcactcctcttccatagcctgcggccttcactctcatctcctggtctccagtgagatgaaccctagctccaattggtccctttaatcaattacctcttaattagtaattacttaatctcaattagcctttcactctcccacacaacaacatcatgggcgtcaaaggttttgtcgaaggaggcatcgcttccatcattgcaggatgttccacacacccacttgatctcatcaaggtccgcatgca

SEQ ID NO: 27104 - DNA, 270 bp, Glycine max
  Clone ID: 700966749H1
ataaaattataaggaaggaaaagcttcaccctgccccatcaagagctgtggaatagaattgcatagctgaaaatgaggagtacttgtgatgaatggaaatcttttatagtaatgatagcaattgatttttcttttgcggcagtgaatattcttctcaagaaagtccttgaagagggaatgaaccatttggtttttatcacataccggctgtcaattgctaccattttcatagccccaatctgctactttagggaaagaaacgacagaccg

SEQ ID NO: 27105 - DNA, 266 bp, Glycine max
  Clone ID: 700966750H1
cagggaccgagttgttgaagctagagatgagttgcatagaatgttgaatgaggatgagttgagagatgccgtgcttctagtttttgccaacaagcaagatcttcctaatgctatgaatgctgcagagataactgataagcttggtcttcattccctccgtcagcgccactggtatatccagagcacatgtgccacatctggtgaagggctctatgaaggacttgactggctctcaaacaacattgcaaacaaggcgtagagatttg

SEQ ID NO: 27106 - DNA, 263 bp, Glycine max
  Clone ID: 700966751H1
agaaaagagaagaaacaaaacaaaaaagagcagagagagagaggaaccatcaccaaccctaatttcttagctaaaccctattcgtttagcatttcctctcttttctcccactcgtaaatcctctcccaaacttttcagatccaaataaatcatggttttctgggtttttggctacggttcactggtgtggaaccctggattcgattacgatgagaagattataggtttcattaaggactacagacgcgtgtttgatttagcgt

SEQ ID NO: 27107 - DNA, 262 bp, Glycine max
  Clone ID: 700966755H1
cccaagcagtgggaggaggctcgggactctgaccgcgtgcctgttgaagaatgagccggcgactcataggcagtggcttggttaagggaaaccaccggagccgtagcgaaagcgacgtcttcacagggcaattgtcactgcttatggacccgaacctgggtgatctatccatgaccaggatgaagcttgggtgaaactaagtggaggtccgaaccgactgatgttgaagaatcagcggatgagttgtcgctaggggtgaaat

SEQ ID NO: 27108 - DNA, 265 bp, Glycine max
  Clone ID: 700966756H1
cagtcggcaacctcgccctcaaaattcccgttgcttctaaacccgcgctctccgttgttcatccttcttcttctccttgtttctgcaaaatcaagctcaagaattttcctcttcaatccgccgtcgttcctttcattcctccggaaagccacttccccgactcgcaggtgcatcctattgccgccacgttccacctcagcaagtccgatatcgacaagctcgccggataatccatcttcgccgggaagctctgcctcaaaatctc

SEQ ID NO: 27109 - DNA, 262 bp, Glycine max
  Clone ID: 700966757H1
gtcaaagttaagcattctcttcctcctagtcttatccttcagttctgtactctcagaactatgcaacccacaagacaaacaagccctactccaaatcaagaaagatcttggaaacccaaccactctctcctcatggcttctaaccactgattgctgcaacagaacatggctaggtgtttcatgcgacaccgacacccaaacataccgcgtcaacgacctcgacctctccgatcttaacctccccaaaccctactctattcct

SEQ ID NO: 27110 - DNA, 238 bp, Glycine max
  Clone ID: 700966760H1
ggttcatgttggattttaatagccatagtgacgtattgatcattcttggcctttcaactaaatagtatttgtgtagtaaattaaaggcacttggatgtaccaaacttcatgctttttgtaggagtgcgtaggttttaaaaattttctgatgtatctttcatgtgtttgttggttttgtaacagaatatttcctatattatacatatatttgagtcactaaaaaaagaaatataagata

SEQ ID NO: 27111 - DNA, 114 bp, Glycine max
  Clone ID: 700966761H1
cctcgagccgattcggctcgagctcgagccgcttgtgaggttgtgctacatacccctagatgaaggtgaagagtcattcaaggacctattagaaagtgtgccttggttatcctt

SEQ ID NO: 27112 - DNA, 264 bp, Glycine max
  Clone ID: 700966762H1
cttagcttaaaaaacagggtagttagcctttggaaagcctcataagaaaggaccaaaaggggtgccgaataacccatctttggtcctcaacaatatatcatccttgtatgcaaaagctccattaatatgcatgtgacatgcttgatatctatatagaaaaagtgtcaccttgatttagagctttaggtagtgtgaaggaaaacttgggaaatggatgtgaagaagtactggttcggttcaagaagtcaaaggacacaaaacata

SEQ ID NO: 27113 - DNA, 261 bp, Glycine max
  Clone ID: 700966764H1
gtgaattgaaattgaagtgactcggggtgagttgactcagcaatggcggaagaggtgactcgggtgatggtggcggtgaacgagtcgagcattaagggataccctcatccttcgatcagcagcaaaggggctttcgactggaccatcaacaagatcgttcgcgacaacgtctctgccttcaaccttctttttcttcacgttcacgtccccgatgaagatggttttgatgacatggatagtatctttgcttctcctgacgat

SEQ ID NO: 27114 - DNA, 270 bp, Glycine max
  Clone ID: 700966765H1
gtggcagtgcctcctcctccaccaccttcttcttccatggactttaacttcgatagcaactgttcctccccttacatcactgcaccttccagcccccaacgctttggcaacttcttcttcagtgcccccaccagccccactcgcagacactcctctgcttccactcccaacaccacccaagacgagttcgaattcgacttcagtggtcatctccagatgccttccctttccgccgaggaactattcctgggcggaaagattagacctctc

SEQ ID NO: 27115 - DNA, 265 bp, Glycine max
  Clone ID: 700966766H1
aaaaaatctacactatctatccttccacaacacaacacaattcaataccatttaccaaactcactcatcaattctcatctttcttctcactaactattaattcatcatgtcgagcacagctggccaagtcatcaaatgcaaagctgcggtttcatgggaggcagggaagccacttgtgattgaagaagtagaggttgcgccaccacaagctggtgaagtgcgtttgaagatcctctacacctctctttgccacactgatgtttac

SEQ ID NO: 27116 - DNA, 260 bp, Glycine max
  Clone ID: 700966767H1
cggctcgaggaataggtcatggtggaaacgcgggtagaaagtggagacccaagggatgtgatctgtgatatgtctcaaaagttaggtgctgacttgttaatcatgggtagccacggctatggagttgtaaagagggctttccttggaagtgtgagcaattactgctcacagaacgtgaagtgcccagttttgatagtcaagaagccaaaaccatctgctggtgctggaaaatgatctgccacttttgttctgtttttggg

SEQ ID NO: 27117 - DNA, 262 bp, Glycine max
  Clone ID: 700966768H1
aaaatttttaaactttgtggttcaccttctgaggactattggagaaaatcaaagttgcctcatgcaacaatatttaagcctcaacaaccctataggcgatgtgtttctgaaacgttcaaggagtttcctgcacctgcaatagaattgatagagatccttttgtccatagatcctgctgatcgtggaacctcagcatctgctttgaatagtgagttcttctcaaccaagcctctaccttgtgatccctcaagcttaccaaagt

SEQ ID NO: 27118 - DNA, 260 bp, Glycine max
  Clone ID: 700966770H1
ctcgagccgctaaccctcacgaaagcccttttcgattccgataactctcgttgttccgaaaccctaaccctaaccgggttttttcgtttgtttggattgaattggcatcggagggaggcgatcgattggaaattggtagtagtagtttagcgttgaagaacgatgtctgctgctgtgtgcggaacaagagatctttcttcgaagagcttcctccttctccgccactctccaagaggctccgttgttcctcttcgccgatt

SEQ ID NO: 27119 - DNA, 125 bp, Glycine max
  Clone ID: 700966771H1
aaaagaactaaacatggcagagaccattcgtttggctgttgctgttcttggtacttcttcgttcattaattccttcatcttagaacttaggattataaattatttattactcattatttgagtct

SEQ ID NO: 27120 - DNA, 260 bp, Glycine max
  Clone ID: 700966772H1
cggctcgaggttcacggtgtcaaatctatcaagctctatgttcctcctcgtgttattcatagctcttgtctctcatacacacggaagcaagatcgaccaccatagaagcaacaaacatgttgccctcttcatttttggcgattctttcttagatgctggcaataacaactacatcaacgcaacaacccttggccaagcaaatttctggccctatggggaaacatacttcaagttcccaacggggagattctctgatggac

SEQ ID NO: 27121 - DNA, 264 bp, Glycine max
  Clone ID: 700966773H1
cttcttaattcaacaatggcagataactcaattagcttattttctccatacaacaagatgggcaaattcaacctctctcatagggtggtattggctcccatgaccagatgcagagcgctcaatgggactccactggcagcacatgctgaatactacgctcagagatcaacaccgggtggatttctcatcactgaaggcaccttgatctctccaacttcttctgggtttcctcatgttcctggaatatactcagatgaacaggta

SEQ ID NO: 27122 - DNA, 260 bp, Glycine max
  Clone ID: 700966775H1
ctcgagccgtgaaaacctaaggaaagtggatggggatgataacacatgtataatagtgggaaaggtggtggtcaccaaaaatccttgccttcacccaggagacatcagagtccttgatgctatctacagtgaagaattagaggagaagggtttgagggattgccttgtatttccacaaaaaggacataggcctcatccaaatgaatgctctggaggtgatctcgatggagatttgtttttcataagttgggacaaagatc

SEQ ID NO: 27123 - DNA, 263 bp, Glycine max
  Clone ID: 700966777H1
gaagaaggttgccgcacgcccaaacgcagcgcttgtcggatacccgcggcgatgtgtgtgtcctccgccgccgaagaagaagtcggcggcttacacggcgagacagagggtcccacccaagaacggttactttgtgccgccggaccttgagctcattttcagagttgcgccaacaagagaagcttttacttagttcatctaaaaattgctgtatacttactgtgaccctttagaaatgtagtcacaaatttaacagcatttta

SEQ ID NO: 27124 - DNA, 262 bp, Glycine max
  Clone ID: 700966778H1
ggttattatgtaagctatgacaattggggtaataaagaagaggttgatcctgccaatataaggtcaattcaagaaggttctgttgatgctttattagaagctgagcgagttgctgaagcaacaaaacaggccatcaaacgaaaaattgtgcaagctgcatctatcgatttacagtctcggagtctacctgcaaagcttcgtatagaggctgatgatcctgaggatgtgaaagcttcgaaacgcaagaaaatacatgccttta

SEQ ID NO: 27125 - DNA, 263 bp, Glycine max
  Clone ID: 700966779H1
cggccatgttgagatacttaagagggctagggagcttggtgactttcttctagttggtatccactcagatgagacagtgagtgagcatagaggaaatcactatccaattatgcatctgcatgagcgtaccttagtgtgttagcttgccgttatgttgatgaagttattattggttcaccttgggaaattacaaatgacatgatcaccactttcaatatctcagtagttgtgcatggtactgttgctgagaagacattaaattg

SEQ ID NO: 27126 - DNA, 95 bp, Glycine max
  Clone ID: 700966780H1
caaaaacccaacacaagtaacgaagaagtcactgccatctcgcaagtttcgatccccagaaggaaaataaaaatgcacgaaattagagaccctgc

SEQ ID NO: 27127 - DNA, 262 bp, Glycine max
  Clone ID: 700966743H1
cagagaattagtccatagcaatggcagagcaagacaaggtgatcctacacgggatgtgggccagcccttatgccaagagggtggaattggcccttaattttaagggcataccctatgagtatgttgaagaagacttgagaaataagagtgatttgcttctaaagtacaaccctgttcacaagaaggttcctgtacttgttcataatggaaaggccattgctgaatccatggtgatccttgagtatattgatgaaacatggaa

SEQ ID NO: 27128 - DNA, 272 bp, Glycine max
  Clone ID: 700966702H1
ctcttcttcaattcattctagttctggattccgactcgccgcattgactcggtccgggttggggtcgactcagttcggtttttcattctctcgcgaatctaatctataggaaaagctaagggcacatcacaatgaaggcattgattctggttggggggtttggaacaaggctgaggccactgacactcagttttcctaagcctcttgttgattttgctaacaaacctatgattctgcatcagatagaggcccttaaggccattggagttact

SEQ ID NO: 27129 - DNA, 265 bp, Glycine max
  Clone ID: 700966705H1
ctcgaccgaatcggctcgagccgccttgatctccgcagcaatagtgaacgttccgaagagaaagaagacctactgcaagacgcaaggagtgcaggaagcacacgctccacaaggtcacccaatacaagaagggcaaggacagcatcgccgctcagggaaaacgccgttatgaccgcaaacagtccggttacggtggccagactaagcctgttttccacaaaaaggccaaaaccaccaagaaaattgtgttgaggctccagtgtca

SEQ ID NO: 27130 - DNA, 267 bp, Glycine max
  Clone ID: 700966706H1
ctcgagccgctcgagccgctcgtctccgattccaccctccgagattactcagtgcgccatagacgaccaagaacaacaccgccaacctcaacccaacagccacaacggttccaacgccgacccttttctcctcaactacagcacctccgatctccgaatcgcttcagagttactcgccacgtggctccctttcctctcacgagatctctgcactcgcatgcaccctgtccctctccgatcgcatccgctccatcgacccaggtgaag

SEQ ID NO: 27131 - DNA, 266 bp, Glycine max
  Clone ID: 700966707H1
cctaattctctctcactacatcgatcctcgtaaagcagctcaacctcttacctccgttcaagtttcacacgttcttccactatgtcctggttgagacacctctcctccaagttctcctccaccaccatcacaagtacgcgccgcttcacttccctgtcccggttcagtacctcgaccgctccggctcgtcatgcgggcctggggcccactcaggctcatgagaagcccaaggtggtggtgctaggctccggctgggccgggtgccg

SEQ ID NO: 27132 - DNA, 267 bp, Glycine max
  Clone ID: 700966709H1
ctaacattacttttaattaagcttcaataaacactcgcgcgtctgttcatgcatttatttacggatttctcttaccaaattaacggatcctgaaagattatttttcctccagaagaagaaaaacaattaattccgaactaggaattcgaacttatcaaacaatcacgaaactaacgcgtggctgataattatcgatcaccgaaatgcatacaaataatcagaaaagggaaaatacgaaacgaagatctcaaagagagagagagagag

SEQ ID NO: 27133 - DNA, 266 bp, Glycine max
  Clone ID: 700966710H1
gcaagccccactcaaccaccacacctctcctcgttcacgctacccctttctgctcttcttctacctttcaagttttaaaagtataaagatggcagagacattcctatttacctcagagtcggtgaacgagggacaccctgacaagctctgcgaccaaatctccgatgctgtcctcgacgcttgcctcgagcaggacccagacagctaagttgcctgcgaaacatgcaccaaaaccaacttggtcatggtcttcggagaaatcacga

SEQ ID NO: 27134 - DNA, 266 bp, Glycine max
  Clone ID: 700966713H1
gaagacgctcaccggaaaaacgattactctggaggtggagagttctgatacgatcgataacgtgaaggcaaagattcaggataaggaggggattccaccggatcagcagcgtcttatcttcgcagggaagcagcttgaggatggacgcacgtgtgcagattataatattcagaaggagtccacgcttcaccttgtcctcaggctccgtggtggtgatttctagttcagttgaatcttgctaatgagatgtttcagttctaataata

SEQ ID NO: 27135 - DNA, 262 bp, Glycine max
  Clone ID: 700966714H1
caggatccgagagatgatcatcaacgtgaaggaatcgacggtggtgcggccggcggaggaggtggcgcggcgggtggtgtggaactccaacgtggacctggtggtccccaatttccacacgcccagtgtatacttctataggtccaacggcacctccaactttttcgacggcaaggttctgaaggaggcactgagcaaggtgctggtgccgttctacccaatggctgggcggctccggcgagacgaagacggtcgcgtggag

SEQ ID NO: 27136 - DNA, 268 bp, Glycine max
  Clone ID: 700966715H1
caaggatgagtccttcgggattgtcaacatgctctgacagtgcagttgaactagcattcaccccaagtttgattaatgaaagcagtgagaatgcattggagttgactttgagtcgccggattatagaggatcttcattattcatctcctcctagtacactggatggtggaatggatgatactatctacgaacaacttgagcaggctagagctgaggctgagaatgctacgctaaatgcataccaagaaactgtaaggcgtaggaaagc

SEQ ID NO: 27137 - DNA, 273 bp, Glycine max
  Clone ID: 700966717H1
aaataattgtgataatgaaacagttagaagcaacgagcagcggctaacaccggaatctgcaaactcaaaagttccatctcttcttccacacatccatcgttatacattttcccgcaaaatattttctttctctgttctgtgccttcttctccaccgttggttcaaaaatcgcagccgttgatcagattgagcctccgtgttgatcttcatcgccatcatggaggtccgttccaatcccgcctccgacaactcctccgaccaccttcgaccgcc

SEQ ID NO: 27138 - DNA, 266 bp, Glycine max
  Clone ID: 700966719H1
catcaatcctctctaggaaccatctaccggcaacaggcggcgctgtacctgctcttcatgctgctgtacgtgctggccaccacgctgggggtctcttgggacgcacacgtcagtcgctactacatgtacggcgacgggtcagcgacgtctgtggcgcggattgtcctggaggcggcagtggtgctcatggatgccaagtacctgctagacgaggcgcggcagctgcagctgcacggcgttgtgcagtacatgacggggtacaactc

SEQ ID NO: 27139 - DNA, 264 bp, Glycine max
  Clone ID: 700966722H1
ctcatctatctttgcttccccttagtcaaacaaagtaacacaccatccatcctctctctcttctcttcttctgttctctagtttcctgctcttgtttcttagaatccgtacggtctaatcaacacaacaaaatggatgcaattagttgcctggatgagagcaccaccaccgagtcactctccataagtcaggcgaagcttcttcgacgattatgtcgtccgagaaggcttctccttccccgccgccgccgaacaggctgtgccg

SEQ ID NO: 27140 - DNA, 264 bp, Glycine max
  Clone ID: 700966723H1
attggagcgggttatctggggatttggggatggatcaaccattccagtgtttgaaactcccgttggaaaaataggtgctgccatttgttgggagaacagaatgccactattaaggacagcaatgtatgccaaaggtgtggagatatattgtgctccaacagctgatgccagggatgtgtgtcaggcatcaatgacccatattgcacttgaaggtggatgttttgttttgtcagcaaaccagttttgtcggagaagggattaccc

SEQ ID NO: 27141 - DNA, 65 bp, Glycine max
  Clone ID: 700966725H1
ctcgagccggtgtgtttgtactgtacttgtgctcgtttttaaatcaatgactttccttttcgttt

SEQ ID NO: 27142 - DNA, 266 bp, Glycine max
  Clone ID: 700966726H1
aggtagttggtgttctttgggcaaataagagggatagtggactatggtttgcgcctcctgagtggagagaatgtaggctcggcattcaactcttaccaatactgcctatttctgaagtcttgttttccaatgttgattttgtgaaggagcttgtggagtggacattgcctgctttgaatagggaaggtgttggagaaggatggaaggggtttgtctatgctctgcagggtatttatgacaatgaaggtgcaatgcagaagataaga

SEQ ID NO: 27143 - DNA, 261 bp, Glycine max
  Clone ID: 700966727H1
gttcacagagagaatggctgcggaaaacgttgttgagttcacagacttacccgtcaagaggccaagagaagaagaagaaggaaccaatggcgtctccaacgacgccgtttcagcgctccccaatgaccctcaataccctggcatctctgcggttattcccggttggttctccgaaatcagcccaatgtggcccggggaggcacattccttgaagatggaaaagattttgtttcaagggaagtctgactatcagaatgtcat

SEQ ID NO: 27144 - DNA, 263 bp, Glycine max
  Clone ID: 700966729H1
ggatgacctctatattgatcacaatctcagcttaaccgaggcactctgtggcttccagtttgctgtcaaacatcttgatggtaggcaactattgatcaaatcaaaccctggggaagtcatcaaaccaggtcaatataaagcaataaatgatgagggaatgccacaacacaataggccattcatgaagggtcgcctttacatccagtttaatgttgatttcccagactcagggtttctttcccctgaccaatgccagttactgg

SEQ ID NO: 27145 - DNA, 264 bp, Glycine max
  Clone ID: 700966730H1
ggccaggcaagccccactcaaccaccacacctctcctcgttcacgctacccctttctgctcttcttctacctttcaagttttaaaagtataaagatggcagagacattcctatttacctcagagtcggtgaacgagggacaccctgacaagctctgcgaccaaatctccgatgctgtcctcgacgcttgcctcgagcaggacccagacagcaaagttgcctgcgaaacatgcaccataaccaacttggtcatggtcttcggaga

SEQ ID NO: 27146 - DNA, 98 bp, Glycine max
  Clone ID: 700966732H1
gtgtatttggagagttctttgtggcaactgacacaaatgctgaaataaactcacctattactgttcatgcatctgaatatcatcgatttggatggttg

SEQ ID NO: 27147 - DNA, 273 bp, Glycine max
  Clone ID: 700966733H1
ctcgagcgattcggctcgagcggctcgagcgaaaacccgaatccggacccggttgtgatacgccaggtttgggcttcaaatctcgaatccgaattccaactcatccgcgaactcatcgaccactatccttttatctcgatggacacagaattccccggtgttgttttccgaccacacctggaccccacaaaaccctacaaccaccgcaacaacaatcgcaaccgccactccgaccactaccgcctcctcaagtccaacgtcgacgctctcaac

SEQ ID NO: 27148 - DNA, 263 bp, Glycine max
  Clone ID: 700966737H1
gtcaaaccataactattccatttctttccaccccacagtttctgaattctgggtgttgagtttcattttctccatttttttttctctcccttggatgtgttattttcaatccaaaagatcatgcaaaaaactatatttgagaatctgaaagagtgactaggtggtctatttgagcttgtgaagtttgtgtttgtgtgaaaggtgtgaggcttattattcatagaagagtttgtgtttgttcacataattgatcgtggtgtggt

SEQ ID NO: 27149 - DNA, 263 bp, Glycine max
  Clone ID: 700966738H1
aaacaatttaccagctatacttgttccttttgaaggttagaagtgctacaatacaaacaatggcagctactcaggaagatgtgaagcttttgggtattgtgggaagcccatttgtgtgcagggtccagattgcccttaagttgaagggagttgaatacaaatttttggaagaaaatttgggcaacaagagtgatttgcttctcaaatacaaccctgttcacaagaaggttccagtgtttgttcacaatgagaagcccatagca

SEQ ID NO: 27150 - DNA, 83 bp, Glycine max
  Clone ID: 700966740H1
ctgagatgcctcatatattatttcattattgtgtaccacttttcaaacttgcttggggtttgtaacaacaacaaccaccaaaa

SEQ ID NO: 27151 - DNA, 237 bp, Glycine max
  Clone ID: 700966741H1
ctcgagccgttcgtttcgacggagaacaaataacgcaacccacccaaggttcgcatcgcatcgcatcatggcccaagacaaaaaggagcgtaaaaggagcatgaagaagaagcagaaccaatctctgacaactctgcctcaggaattgatcagagaaattcttctgagattaccggtgaaatctcttctgcgtttcaagtgcgtctgtaagtcgtttctgtctctgatttcggatcc

SEQ ID NO: 27152 - DNA, 265 bp, Glycine max
  Clone ID: 700966742H1
ctctcgcattccgtggagatctagtgcttctgctgcaagacctcgctgaaaattagggtttcgattcggaggtagacgaagatgttcggaagggctccgaagaaaagcgacagcaccaggtactacgaaatcctcggcgtttccaagaacgcttcgccggatgacttaaagaaggcttacaagaaagccgccattaagaaccatcctgacaaaggcggggatcccgagaagtttaaagagcttgctcaagcctatgaggttctga

SEQ ID NO: 27153 - DNA, 204 bp, Glycine max
  Clone ID: 700966701H1
ttctcgagccgaatcggctcgagcggctcgagctgacatggcttcatcactcagaatttcaagactcatctctcgctcctttacttctacctccttcttttcacgaggtgggaatggtttccttggttcaagacactgcaaatacagcacttcttctgccattgaagaagaacccgttaaaccatcagtgcaagtagaacacac

SEQ ID NO: 27154 - DNA, 272 bp, Glycine max
  Clone ID: 701096944H1
ccgtagcggtggcggtggagcatggcggggcggtggatatggcgtggcgtggcggtggcatggcggtggcagagaccgtggttatggtggtggtggtgaccgtggttactctcgtggtggtgacggtggtgatggaggctggagaaactagggcttgatgtcgttgattagggtttatgattatgctcagtaattttagttgtgtttgagtttgagtatctttatggttttgtgtcaccgtggttcttgtgtttgaccaatatatctggttg

SEQ ID NO: 27155 - DNA, 292 bp, Glycine max
  Clone ID: 701096948H1
gctcgaggcaaagtgaattagacttagattctgattctgggattggatggagctaggcctcatggataagaatccaacgaagctggaacactttgatgacatgtggaggctcgaatccactgccacactattatctcacttgaagggggatgatggtcgacatgtcttgacattggatcgtacaatattctatccgcaaggtggtggtcaacctgcggatactggctttgtactcattcatggctttgataacaacaaatttctggtttctgatgttcggtccaaagatgga

SEQ ID NO: 27156 - DNA, 284 bp, Glycine max
  unsure at all n locations
  Clone ID: 701096980H1
ctcgagccgctcgagccgattcggctcgagctcgagccgtttaaaactctctctctctcaaaacattcgaaacccanaaaacaaaaacaagtctcttatgataaaaaatgaaacaaatagaaatggaaagtaacgcatcagcactagcaaagaaagtttggagcatggtacgtgtggtgttgttcatgcttcgaaaaggcataacaaaggggaagctcatgatggacctcaacatgatgctgaaacgccgcggcaagctcgccggcaaagccattgccaactta

SEQ ID NO: 27157 - DNA, 267 bp, Glycine max
  Clone ID: 701097102H1
tgctgctctatctatcgggtaatcagtctcttggtcaaaagccggtacctaattcccctgctggtgggccgatcctcgtctagcggtgggaaccggctggtatggatcaattgcttgccctgtctctcttctgttcaaccatcggaactccgcagttctctttttgggtggaataataggcgaaggaatccgcagctattgaatcagctgttagaaatggacgaatggcttagttgaacatagtgggacggaaggttcagaggcttc

SEQ ID NO: 27158 - DNA, 116 bp, Glycine max
  Clone ID: 701097205H1
tttcgtttcgttcactgccgtttccctctctctcacactcacactcacactcctcccaaaaacccagaaccctaactctctttcgcacactttctcacgctcgctgcagccatgaa

SEQ ID NO: 27159 - DNA, 229 bp, Glycine max
  Clone ID: 701097207H1
attagaccttgatcggcttcactaacgcagacaatgtcagacaagcctcgtagtggaacccgtttcggtgccgattcggatgccagtgacctgtatgctggtggagacaatgaatatgtgactgagctgaagaagagggcgatgatgatgacaccaagtccaagggcaaagcttcatcatcagaaggcggtgtacgacagaagccgcgtaccttcactgtccaggatgc

SEQ ID NO: 27160 - DNA, 273 bp, Glycine max
  Clone ID: 701097217H1
tctccgtttcgtggtcgtctctcgctagaaatttattacacggtgatgggagattgggaacccatgtcggattgccacggacgaatgcgtgttctgaaggagccgaaggggtattagggtttgttaggggctacgtatctttgccagagctcgcagtaatggcctcgtttccaatttgcctgattttaaatctgttgcagcaaaccctaggattcgccgattgttttgcagcatagctccaaagaagaagaattatgagaacttctatcccaa

SEQ ID NO: 27161 - DNA, 109 bp, Glycine max
  Clone ID: 701097283H1
cagctcgagccgctctattgcttcaatttctaactcaggggcttctagttttacttgcctgaagcgttttacaacttcaattttgctcaagttcatccaaacacgactt

SEQ ID NO: 27162 - DNA, 272 bp, Glycine max
  Clone ID: 701097313H1
ctcttctcttaccgagtttataaacttaacctaaacccaacgtcgtcgtttcgtccccctaattatcatcgtctcgcgaaccaccgcgtcaatgtcggccagtggtggcgccgccatcgacggcggacgcgccaaccgccatcggcatctcggtgagaaccgcttctacagcccgccgccgctgaggaaacacaaagagaagcaggagcagcagcggtcgtcgctgtcgacaacttcctccggagaacaggcctcggttctcttccgatgtt

SEQ ID NO: 27163 - DNA, 259 bp, Glycine max
  Clone ID: 701097325H1
gcgaagaagaagccacagagaaccagtctcctactctctctcacccacaagaaaaatggcatctcacatcgttggatacccccgcatgggtcccaagagagagctcaagttcgctctcgagtctttctgggatggcaagagcagcgccgaggatttgcagaaggtggctgctgatctcaggtcatccatctggaagcagatcgctggtgctgggatcaagtacatccccagcagcactttctcgttctatgaccagctg

SEQ ID NO: 27164 - DNA, 262 bp, Glycine max
  Clone ID: 701097415H1
ctcgttcgtttcatttcgtttcgttgaagagcaacttttctctctctgtctctgtacaattctcccttatcttccctcgtagatcgaaagggaatattcttccatggcctccaagcggattctgaacgaggtcaaggacctacagcaagaccctccaacctcttgcagtgccggtcccgtagcagaagatatgtttcattgggcagcaaccataattggtccccctgataacccctatgctgggggtgtttttctagttacc

SEQ ID NO: 27165 - DNA, 236 bp, Glycine max
  unsure at all n locations
  Clone ID: 701097457H1
taggcactgctaaaacttgtccttttcctttccccccgcaaataataacataaaataaaatccaacacatttaaaatatagcacgncancaanggtgtcnncgnaacggatatagcataaccgtttgaacagtctttangaaaatcaatctgcaaactggatcatcttgtaattctcagatcatagatctatatgtatgagttttgaagagaaaaaaaggagaaatttgatctttg

SEQ ID NO: 27166 - DNA, 262 bp, Glycine max
  Clone ID: 701097464H1
tcgacaataaaggtattgcatgagcttgtcaaaacacaatatatatctcctctaagcatggagtcaacaaagcagtctataactgagaaacaagctaaggagctgagagacatgaaaggaggtcgtggcattttggacaatctcaacagtagggaaagacaaatcaggggaattgaagcatcatttgaagcagctaagtctgatcctgttcatgcaaccaacaaagatttgtatcctgttgaggttatgccgttgctgcctg

SEQ ID NO: 27167 - DNA, 127 bp, Glycine max
  Clone ID: 701097466H1
gatatcctccatatgatgaaggtgaaagcacggtctggaacatcagacacagggaatggaaaacgcaccatatcacaacacattacacatggctttcacttgatgtagggcacatcagcgcatccta

SEQ ID NO: 27168 - DNA, 247 bp, Glycine max
  Clone ID: 701097531H1
cgttgttcgcacgccttgttcggtgaagtgagtagtgagtgctgaatcgaatcgaatcgattctccgaacatggcggcgagcgatcgcacagtgttgcaattctcttcatcatcttcttcttcttcgcagatcttgtccgcgaaggtccaccctctggtcatcttcaacatctgcgattgctatgttcgacgccctgaccaagccgaccgcgtcatcggaaccctattcgggtccgtcgttcccgac

SEQ ID NO: 27169 - DNA, 215 bp, Glycine max
  Clone ID: 701097532H1
ctttgttcagtcttcttctcttgcggctatggttttagcgcacgttcttcctagatttaaggaagatgggtaaggaaaaggttcacatcagtattgtggtcattggccatttcgactctgggaaatccactaccactggtcacctgatttacaagcttggaggcattgacaacccggttattgagaggtttgagagggaagctgctgagatgaac

SEQ ID NO: 27170 - DNA, 263 bp, Glycine max
  Clone ID: 701097628H1
ctcgagccgtttgaattgtagacgtacgatgagagtcaaaaaaggcaagatgatgattgtattgcggcgtgtagagagaggatttgttcaattccaaatatgatactaactcatagtttcagtaccatagtaggatcaggctagggttttataataagctgctgaaaccaatgttcaaattgcagttgttgttattgttgttgaatctgccgcaccagacaccgattcattcgaccaaaacataagcatgtcgggatctgaca

SEQ ID NO: 27171 - DNA, 274 bp, Glycine max
  Clone ID: 701097632H1
tcaagcttcagcaagtgcgttttggaagcagagaccgaaatacttcgagatggcccgtacactgcaaactgctcgtaagtcaactggaggaaaagctcccaggaagcagcttgcaaccaaggctgcacgtaagtctgcaccaacaactggtggtgtgaagaagcctcatcgttatcgccctggaactgttgctcttcgtgagattaggaaataccagaagagcactgagctcctaatcaggaagcttccttaccagaggttggttcgtgaaatt

SEQ ID NO: 27172 - DNA, 157 bp, Glycine max
  unsure at all n locations
  Clone ID: 701097717H1
atcgagccgctatatactaatctccatctaatagtgttaatttgtacttctctatctctatcactcatngggtgttttgcttttgatgaggaaaactcctccaccgtggctccggcaacactctacaaagctctgacaaaagatgctgacactatca

SEQ ID NO: 27173 - DNA, 146 bp, Glycine max
  Clone ID: 701097795H1
gtttatgtgagattccccagaccagaaagatcaatgagacttgataaccaccatattgaaattgagagacaattgaaggatgtcaaatggaagaaagaatagattatggaggaattaaaaagggaacaaatattgttggacacgac

SEQ ID NO: 27174 - DNA, 200 bp, Glycine max
  unsure at all n locations
  Clone ID: 701097832H1
cacaatcgccaagtcatagttcgttcncaaggttgtgacccaaactccatttacaactttcaatctcacgacttcaatgttcctccttttgtttcccctgcccccaacccacatctgaaacaaggttcccctcacatcttttactttccttcgtggtctccacgagtctccgtgagcccgtgtatgcactcttgcaatcc

SEQ ID NO: 27175 - DNA, 192 bp, Glycine max
  Clone ID: 701097844H1
gtgaaaagcaatagaattcaaagagagagtttcttgttctgtattttttgatttgatcatttcaatcctcaattttattttatatatccaccaatccgcaaagtgcaatttctaatctttcacgtattgggttcttctcttttcgctcttcgtctccgatcgatccaattctcttcccatggctacgatcgg

SEQ ID NO: 27176 - DNA, 125 bp, Glycine max
  Clone ID: 701097886H1
accgttctataccactcttcaattcactaagtctaaggcgtgcccagagatcactttgagccctcctgcatgctgtggcagttcttggcagcagcgagggtgtcactggaacattgtcttcactc

SEQ ID NO: 27177 - DNA, 260 bp, Glycine max
  Clone ID: 701097902H1
cgagggccatccttggcagaagttccccttatggaaatgctggattacaaatacttgataggaactggggagctggttggcaccttttatctttattgcttgctactaaaccttctcaaaggataagttgtttggatgctcttcgacacccattcctttgtgggccaagatggcgagtagtcccatcaatggatattatccgatggggtctgggttctactgcaatgcgtattagggagaagtacatctatcgtcagcct

SEQ ID NO: 27178 - DNA, 126 bp, Glycine max
  unsure at all n locations
  Clone ID: 701097942H1
gttatcaataaattcttgggaagatggacatcgtattaccatgtatctaaaactgtttccttcatacaatgatcccggccagttgntcaatgcaagcgaggtttaccgcatcaaaactatatttac

SEQ ID NO: 27179 - DNA, 237 bp, Glycine max
  Clone ID: 701098031H1
gaaaaccctagcttaccttttcaactttcaagatgcaaatctttgttaagacactcactggtaagacaatcacccttgcggtggagagttcagataccatagataatgtaaagtccaagattcaagacaaggaagggatcccaccagaccagcaacgtctgctttttgctggcaagcagcttgaggatggacgtacacttgctgattacaacatcagaaagagtctactctacacct

SEQ ID NO: 27180 - DNA, 257 bp, Glycine max
  Clone ID: 701098144H1
agactcgagccgctgtggtggctgctgctgttggagcttttcttcatgttctgtcgaacattgggggttttctcaccacgttggcttccattggaagcatggtttagttgctatctacaccccctgttgaagagcaaaagacgttgtctctgttgatggcttcggccttgtttcagggcgtctccattggacctctgattgatttggctattgccattgatcctagccttattgttagtgcatttgcggcacttctt

SEQ ID NO: 27181 - DNA, 246 bp, Glycine max
  Clone ID: 701098157H1
tcgagcacatgcagaatctacttggctatgcttgttctgtatattgtgtgtataaaatgatcaagtcattgcaaagtgttgttttcaaacaggatggttctgttgatcctgtgacaaggacaataagtatatttcttcagttctttgatataggaataaatgcagccttattatcacagtatatttccttgctattcatcggaatgttggttgtgatatcagtgcgtggattcttaaccacctaat

SEQ ID NO: 27182 - DNA, 276 bp, Glycine max
  Clone ID: 701098264H1
ctcgagcaagttagagcatgctgaactaagttggtatccattgaatggcttctggactatattattcaagagccggtattaatggatgaaatgcatgttatctggatgtgcaatttgggctgcagcaacatttgcagtattattatgtatggactgtttagaatgtttcttacatgcgctacgattgcattgggttgaattcaggataaattctattatgcagatggaaaagcatttgaaccattcacatttgtgcaagaagaggactaccagtaa

SEQ ID NO: 27183 - DNA, 107 bp, Glycine max
  Clone ID: 701098302H1
ctcacaacagcagctgcagcagcaatggctcccaaacgaggtggaaaggctccggctcttgtcgctaagaagaagcctgagaaggtcacgaatccgttgttcgagaa

SEQ ID NO: 27184 - DNA, 270 bp, Glycine max
  Clone ID: 701098331H1
tatcggggacagagactgatgatcagatcctgtagcgactacgtattgctgatgctgagattgagcaagggtaatcttcgcaaatatttgatttcatcctatacaatgacaatctttaggagtgtcatgagagacttaaggtaaatgcttctgaagcaaagacctccagagtcttttggatgtcttttgaccattaatcatcctgatgttaagtatcatttggtgcagaaactattgggacttgacggctatgtcactgctccacctata

SEQ ID NO: 27185 - DNA, 255 bp, Glycine max
  Clone ID: 701098383H1
tggctgctgcatcatttggtcaggtttactttgcccgtactactgatggtaataatgttgctgttcaagttcagctgtctaatttgcatcatgtggtggtgcgggatatctacatccttcgttttgggttggggctgctgcataagattgcgaagagaaagagtgtcgctcgcctgtatgctgatgaactagggaaaggttttgttggtgaattggattacactttagaggctgcaaatgcttcaaagtttctgg

SEQ ID NO: 27186 - DNA, 260 bp, Glycine max
  Clone ID: 701098417H1
ggagacaggcaaacgggatcgctgaaatcaattagtctggttgtagtgggaaaagagaagagaatgaaaatgggtcgtcggtgcaagtgtttggtatcgttggtgttggctttggttctgatgaggagtttggcggaggcgcaatcgggcagcagcaccacctgcgcccaggagctaattccatgtgtgaactttctgaatgggacaaccagcccaccaagctcttgctgtgaccctctcaaacaaaccgtggaaaacca

SEQ ID NO: 27187 - DNA, 256 bp, Glycine max
  Clone ID: 701098448H1
ctgcagggaaaccagttcattttcgagcgcgtcgctttcgaatccaagcgccttcaacaacgcactgagatctgccgcgaactcgtcgcttcttccgaatcttccttctctaactcagtgagcagaggttttcattcaactggcatgaagaggatgggaggtggacatggtcatgatgagccctactatcttcaggcaaagcactggtaaaactgggccagatggaggcacaaggggtggaaatggcccctgctgg

SEQ ID NO: 27188 - DNA, 259 bp, Glycine max
  Clone ID: 701098450H1
tgcgaggctacaaagaaaaaaaaaaaagatgaatcagtgtggttatcagcagaagaatgctttgacaagctgtgacgagatgaggatggaatcagtggtgtgccctaaaccacgaagattgggcctgttgaaccagtcaacctttgatgaccagatcagacccttgaggccaccctttatcaagtaccaatcagaaattcaagattcaggagttggggctgagcttctggacatcattctccccaagagatctggaggg

SEQ ID NO: 27189 - DNA, 251 bp, Glycine max
  Clone ID: 701098487H1
ctagttttcgtagcatggccatgccatggcgcaggctaggaaaggttccctctccgaatgaaaactggctatggtcagcgttcttcggaggtaaaatgcggaagttttaaccttgctgtggaagcagagaagatccgagataggaaaagcattcctgaagagtgcgttgaaccaagaaaggagtacattaatggcgaacaatttagatcagactctaaaacagttaaccaacaaggctttctttgatgcta

SEQ ID NO: 27190 - DNA, 254 bp, Glycine max
  Clone ID: 701098494H1
tgcaaatcgagatcctgctcggaatcatcaagctcgactcgctcgtaggctcatggctcgccgggagaacctccgactggagaggtcggcgttacacgattgttttcgccggcgccatcttctttgtcggagcacttctcatgggtttctcccccaagtagtcctttctcatgttcggccgtttcgttgccggcatcgggatcggctacgccctcatgatagcccccgtctagagcgccgaggtctccccggcc

SEQ ID NO: 27191 - DNA, 272 bp, Glycine max
  Clone ID: 701098538H1
gaacgaccaatcgcagatgatgatgaatttgaaccagatgatccagcctcagatgatgaatcaggtgcagattataggtcagtcgcagcctcagatgctctcgcacaatcagggaatgaatcagcaagcgcagagcctcagatgaatacatcgcagattatgatgaaccagtctcagcctcagcctccgatgatgaatcgtggatacaacaaggtttggtctcagcaacctcctctggaccctaacatgaagtttcagaaccctatgaaacc

SEQ ID NO: 27192 - DNA, 272 bp, Glycine max
  Clone ID: 701098544H1
gccacataaagacacaatacagagtgagttgttgctccttcgccactgctctctgccaacatgggtatctccagagattctatgcacaagaggcgtgaccactggtggcaagaagaaggcctggaggataaagagaaactatgatcttggtcgccagcctgctaacactaagctgtcaagcaacaagacagtcaggaggatccgtgttagaggtggaaatctgaaatggagggcattgagattggatactggaaattactcctggggaagtg

SEQ ID NO: 27193 - DNA, 271 bp, Glycine max
  Clone ID: 701098555H1
ctccaggttaatcctgccgaggaggagacacaggaaagtgatacaattgcagaggaggatttctttcgcaccagccggaaacaagccgaagaacgtgttgagaggtgtgtcatacgtgtgcaggccatgttccgttctaagatatcacaagatcaatatagatggttgattctgatacataatctttctatgctggatgatttagaagatttcctaaattctgaagatgacatgttacccaagacatagcttggtgccttttccaaaacaa

SEQ ID NO: 27194 - DNA, 272 bp, Glycine max
  Clone ID: 701098561H1
tgtagcaggtggtatttgtgattcagtgtgcggtgaagtggtttctaagcaccgggcggcggccagtgccgttggtggtggcggtgttggttttcgtggcagagttgaatggggttggggtggggatggaagaattagctaaggaggttcatgctaaggtttccacatgtagggctatttttaaagagttgcttgagacacttgtgaaggttgcacaggtgttgccttgggggaaggatgttaccgtgaagaacattgttaagaatgaccga

SEQ ID NO: 27195 - DNA, 269 bp, Glycine max
  Clone ID: 701098576H1
cctcgagccgattcggctcgagcgccgtcgtacacggtggcggaggacgtggaggggagggcacggatggcggtggtggctccgagggaaaacgtcgacgttttgaaggtgaaaacggagagagggaacagcgttgtggcgatgtacataaagaacccaacggcgtcgttgactttgctttactcgcacggaaacgccgctgatctgggtcagatgtacgagttgttcagcgaactcagtatccacctccgagttaacctcatgggtta

SEQ ID NO: 27196 - DNA, 257 bp, Glycine max
  Clone ID: 701098661H1
ctaatatggcagccaatgttcatgatgcaaaacgcaaactcatatctaagactttccgtcgcttgcctgacgtgagtgacagacaaacattcactggtccaccagacaatgtaagagctcatgtcatggctgccacgaggtttctcagcaagggagacttccagaaggcttttgacattattgtgtctcttgatgtgtggcaatttctgagagctcgagacactgtgcttgagatgcttaaggacaaaatcaaggag

SEQ ID NO: 27197 - DNA, 267 bp, Glycine max
  Clone ID: 701098712H2
gctctttctgtcacacactcacattccggtgcaaaatgaaggtcatcgccgcctacttgctcgccgtattgggaggcaatgcagccccttccgctgatgacttaaggaccatccttggctccgttggagctgacgcgaatgatgacaacatcagccacttcttgtctgaagttaagggcaaagacattgcggagcttatcgccgccggtagggaacagttggcctccgtgccttctgccggtggcgccgcggtttccgtggccgctg

SEQ ID NO: 27198 - DNA, 268 bp, Glycine max
  Clone ID: 701098720H2
ctcgaccgcgggacatgatattctgatggctaccatgctgaatggagcagcaatcatgcatggagctttgctagtcattgctgccaatgaaagctgcccacaagcggaaacctctgagcatttagctgctgtggaaattatgcggctacagcacatgataattcttcagaacaaggtagacttgattcaagaaaatgtggctatcaatcagcatgaggcaatttcgaagtttatacaaggcactgttgctgatggtgcaccagtagta

SEQ ID NO: 27199 - DNA, 266 bp, Glycine max
  Clone ID: 701098728H2
cacttgtcccgccacaagcccttctgtaccaatcgatcttgctaactccccaatcgcgcaaaccacgcgtgacgccgatacgccctccgtggacaccgccacgtgctcaaacgcgaaggcgagaactgccacgtcctcgtcctagaccttgtggttggtcggctttccgtggtagaggtcgtcgttgtccatatagggcaggttgtcgtggatgagcgccatggtgccgttgacgagctcgcatgtggtgatgcagagcacggggc

SEQ ID NO: 27200 - DNA, 277 bp, Glycine max
  Clone ID: 701098732H2
ccagtctataaaccaccagtgtacaagccaccagttgagaagccaccagtatacaaaccacccgtttataagccaccagtttacaagccaccagtgtacaagccaccagttgagaagccaccagtgtacaagcctccagtgtacaagccaccagtatacaaaccaccagtttataagcctccagttgagaaacctcctatttacaagccaccagtttacaagcctcctatagagaagccaccagtgtacaagccaccagtgtacaaaccaccagtgt

SEQ ID NO: 27201 - DNA, 266 bp, Glycine max
  Clone ID: 701098734H2
ctcagaacaatatctttctctctctgttgtggcttggcctcttgctgtaagaagccagccacagtactgttgcgctcctgtggaaccatcgatgggctctaacaggttccacatcggttgagccctgtgtcagatatgccaatagtgttatccttattcttgtgatatactagtttgtatgatcatattttctcggattgtctagcaagtttagctcaattggacgttgaacgaattattataaatctattaagatgatcttcaat

SEQ ID NO: 27202 - DNA, 265 bp, Glycine max
  Clone ID: 701098743H2
cctcgagccggctcgagcggctcgaggcaccagtttcaccgcacagctatcttgttgtttacagcgatcccagaaaaactctgtaaacatgttggtttaccaggacctccttacaggtgatgagcttctctctgactccttccgttacaaggaaattgagaatggaatgctgtgggaagttgaggggaagtgggttgttaaaggagcagttgatgtagacattggtgcaaacccttctgctgagggtggaggagaagatgaggga

SEQ ID NO: 27203 - DNA, 256 bp, Glycine max
  Clone ID: 701098746H2
gtgtgcttcaattccatggctaaaccgtatgctccaagacgaaccctagaatcatactcagtcaaacacataagccaaaccagtagagctcgcgattgcatcctcatgcggccctccgatccgtcgaaaccgtcgtacgtagcgaggatcgagcggatcgaagccgacgcgcgcgcgcgatacgtgaagattcacgtgcgctggtactaccggccggacgaatcaatcggcggtcgacgccagtttcactgctcca

SEQ ID NO: 27204 - DNA, 265 bp, Glycine max
  Clone ID: 701098750H2
gcttcctcgctctacagcatcggcaagatccggcgtcggaacctcgacgctcccgtcgttaaccccaccgaccaagtactcgtgtccaagcacatgctcgaggcttctcttatggggtttgtgctggttctgtctttgctgatagatagattgcccattacatccgagaacttaggttactaaggaaggccatggaggctgctaagaaacagagtcggaatttcgaagatggtaaaagtgtcagtgcagcagagcacaaggcgtt

SEQ ID NO: 27205 - DNA, 255 bp, Glycine max
  Clone ID: 701098758H2
gtcaaatctggatgttgtcagccatatttcctgtcactgttgaggtccttatagataggtatcttcaaaagccttatggcatcaatcttatggatgagctaactttgaagggtattacacaattttatgcattcgtggaagcgagacagaaagtccactgcctaaatactctatgtgctaagctgcaaataaaccagtctatcagcttctgcaattcagtgaatcgggttgaactacttgccaagaaaatcacag

SEQ ID NO: 27206 - DNA, 261 bp, Glycine max
  Clone ID: 701098776H2
cgctctttgcaaacttggtatggtccttctatccatcaatccatccatagagactgatgatggagttcggatttctaatgtggattcttgttactcattgcataagcagcacaaaagatgagcttgtctcaagtgaagaatgacatagagattgctaaagtaaaatacaacagaaaaaaaaaagattgctaaagtgaaaattaaaagaaagacaagaggttttgtatggagaaaaacggtcaataagtggaagaccctaat

SEQ ID NO: 27207 - DNA, 172 bp, Glycine max
  unsure at all n locations
  Clone ID: 701098848H1
ccgcgagccagggtttgtgaagatgacgacgattcgcatgttttgctgcaacgatcttcttcgctttgccggcggtaatctcngacatctcaccgaaacattcaacatgtcttctacatgacctatcttgcaagatggactgactatttcacgttggcgaaggcctggaaat

SEQ ID NO: 27208 - DNA, 162 bp, Glycine max
  Clone ID: 701098895H1
ctaatactaagcgaaaggcggactggttaactgaaaaaatgcgtaacaacaatttcactgtctcatcaatgcacggtgacatgcctcagcacaacagacatgctattatgggagacttcgtgctggaaaaaccgtgtgcaatacaaatgacgtttggcccgt

SEQ ID NO: 27209 - DNA, 280 bp, Glycine max
  Clone ID: 701098916H1
cggatatagcttcttcgaggctgttcgggtggcggagactccgctccggaatataccattccacgcctcctccatctccctcaccttcttcttcgtcgtagcgttcaaaacgacgtgatctctctctcgctttctctgattcggttcttctcgtcgttttatggatccggcttctagaactttcctttctcattgtttctcttctctctcgtcgagccagaaatttcttagatgatttggtgctattcgtctttttcttgttcgcttcaattcttcaggt

SEQ ID NO: 27210 - DNA, 278 bp, Glycine max
  Clone ID: 701098917H1
caaatttcatttcgtcaatcactcctaacttctgcattccaaaaatgaactcggacacgacgtcgtattggtgctacagttgcacgcgcttcgttcacatccacgagcagaacgacgtcgtgtgcccccgctgccatggcggcttcgtcgaaaaggtcaccgccgggcaatcggcaaggcaggggttccgccgacgccgccgcaacgccgggaggcactcgccgttcacaccggtgatcgtgctccgtgcgacggggggaggacgaagagagcagctt

SEQ ID NO: 27211 - DNA, 232 bp, Glycine max
  Clone ID: 701098925H1
gcgcgggattcggctcgaggacaactgccaagcccacccatattcattctctcaaaacttccaaccatgagctgaagcaccacacatacccacttcctgcaaagacatcatttttattaccaatcttccgatttcagagataagtctctgtgggcatcgcttaattaaaggaatgtcaagtttccccaacacggtggcggattgccgcaggtccagcaaggcaccggaaaaa

SEQ ID NO: 27212 - DNA, 272 bp, Glycine max
  Clone ID: 701099010H1
ggctcgagcgattcggctcgagaaagattcgattttactgctacggatactgctggacacgagaaatttggtggcctcagagatggatactatatccatggacaatgtgctattatcatgtttgatgttactgcccggctaacatacaaaaatgttcccacctggcaccgtgatctttgcagggtctgtgagaacatcccaattgttctttgcggtaacaaggttgatgtcaagaacaggcaagttaaggcaaagcaggttacattccacag

SEQ ID NO: 27213 - DNA, 259 bp, Glycine max
  unsure at all n locations
  Clone ID: 701099074H1
gtccaagccaacaagaaaaacgggatattgtcctacttggggacatcgttgtgaccattttgcatttcctcctcctccacaagctgatagaagccnggctggaccacgcccatgccctgtgtgttatattccagtggagcaagctatagctagtatgccaagttccccatcagaatctcccatacttcgcactttgacatatgtgcatgatgaaaatccaattgacagtcagccacatggtggctctgattttggtgga

SEQ ID NO: 27214 - DNA, 257 bp, Glycine max
  Clone ID: 701099125H1
tgttgtgccctttaatttcgggaggtcattctttcattcttgttagttttagtttcagtcttgagactttcagatccataggccaaatcttaggggtcatgagtttggtgttgatgagtcttggatatctcatatgattgtccaaccaaaccaaacatgaacgaaaagacagcacccttgtaactcaaaggtagcaacttgagacagttttctcaagttcgaacatctaagataacacaaggtccaattggaatccg

SEQ ID NO: 27215 - DNA, 253 bp, Glycine max
  Clone ID: 701099166H1
tcgagcttgaggtggaaagctctgacaccatcgacaacgtcaaggccaagatccaggacaaggaaggaatccccccggaccagcaacgtctcattttcgccggaaagcaacttgaggacggccgtacccttgctgactacaacattcagaaggagagtactcttcacctcgtcctccgtctccgtggtggcatgcagatcttcgttaagacactcaccggcaagaccataaccctagaggttgaaagctccga

SEQ ID NO: 27216 - DNA, 232 bp, Glycine max
  Clone ID: 701099181H1
agccacgagcctcttctctaggataactctgctggagagactccgccaagtccaaggacaacattgcagaattcacgggagaagaaacaagtatctgataaggaagcagaatatgaagcagaagaagcaaaagcagatgcttgattggatctaaatgcccctggtggtgattctgctattgggtgcagtccaatgctggatctgatcacgtgttctgacacagatatgtcaa

SEQ ID NO: 27217 - DNA, 263 bp, Glycine max
  Clone ID: 701099370H1
ctgtataacatataaaaggtaaccatgtctctttaggctgtaccagtggtgtttttgctggcaacaatatcactagccagtgatgacaccagtttcacctataatgggttccaatcttcttatttgtaccttgatggaagtgctgagttcaccaccaatggcatgcctaagctcaccaatcacaccaagcaacaaaacggtcatgctttcttcccaagtcccctagtcttcaagaacaccacaagtggaagtgtgttttcttt

SEQ ID NO: 27218 - DNA, 277 bp, Glycine max
  Clone ID: 701099380H1
ctcaacttgaccctggcaaaaactgaggcaaaattgctgcatgagaagatttcaaacaaggcttataatgatgacgacttcatcaggattttggccacaaggagcagagcacagattaatgctactttgaatcactacaaagatgcatttggacaagatatcaacaaggacctgaaggctgatccaaaggacgagttcctgtctttactaagagcaactgtgaagtgcttgatccgtcccgagaagtacttcgagaaggttgttcgcttggcgatca

SEQ ID NO: 27219 - DNA, 191 bp, Glycine max
  Clone ID: 701099396H1
acatattcgtcgaacacgtggttgatgtcgaactctccgaccgtctcgtccacgtcctcgcttcagcagcacaacaagaccaaaccctcgatttccaagacatcatcaaacgtttcgcgttcgacaacatctgcaaaatcgcgtacgggtatgacgcagagtaactgacgccgtcaactgaacagagtaag

SEQ ID NO: 27220 - DNA, 272 bp, Glycine max
  Clone ID: 701099416H1
cacgtttctctcttgaggttaattattattattattgagtattgagcatggaggcgccatctctcaccaaacccaacgacccaacaaaaccttccaacacttccagcacccttagtctggagggggggccgggcgaacgcgcccactccgaaaaatgtttgcggtggcgtccatcgccgccggcatacagttcgggtgggctctgcagctgtctctcttaaccccctacgttcagctcttaggagtcccccacgcggcggcctccttcatct

SEQ ID NO: 27221 - DNA, 250 bp, Glycine max
  Clone ID: 701099610H1
atctgagagtctttcttagctgatatggcggttgatcgctcccttacgaggtgctgtagccacgtactgtggtcgtggatgttgctgaggatgatgatggtgcaaggtgcagacgcgagggataaccggaagggtgggactcggtcataaagttaacggctgaacaggtcgatgctgactcggatcatgaagtgggaacacgattggcggttcttgtggctggttcaaacggctatggaaactacaggca

SEQ ID NO: 27222 - DNA, 253 bp, Glycine max
  Clone ID: 701099626H1
cctcaacgcatgtactctgacaaccacaagctgcaagttatgctcccccatgtgaccggtaactacaccgccttgcagatgcatcttgtcaccttaatgcaacagaaccagcagcgaacagaaagcacggaaaagaggttgttcagggaaaggtagaggataaaaacgttggtgttggtggagggaaggtaccaagacagttccttgatataggtcccagtggcacagcagaagtagatgatcaagtttcgga

SEQ ID NO: 27223 - DNA, 88 bp, Glycine max
  Clone ID: 701099683H1
ggctcgagtgcataagagagatatcttgagacagtagtagacttccttagctcttggtgtattttgtttagctgtctgtgttgttcct

SEQ ID NO: 27224 - DNA, 125 bp, Glycine max
  Clone ID: 701099833H1
cttatggtggatacctaggcacccagagacgaggaagggcgtagtaagcgacgaaatgcttcggggagttgaaaataagcgtagatccggggattcccgatataggtcaacctttcgaactggtg

SEQ ID NO: 27225 - DNA, 262 bp, Glycine max
  Clone ID: 701099840H1
cccttttgctcttccttagcttctaatcacttccctattggggtatgcgcaagttgaagctgttgaaatagttgtcagttttttctctctcaaagttgtcattttctttgtgggcatttttttttgctgtgtctcagttcctgtttagtatctgggcgggaagttcattgggtttagatctcatctcacaagtggtttctagggtttttccttttggaccaattaggtactaatcttgaacctcaatttggagcattctctt

SEQ ID NO: 27226 - DNA, 274 bp, Glycine max
  Clone ID: 701100118H1
cagaagccaccgtggtttgaggcactactggggccttcgtgtccgtggtcagcacaccaagactactggccgcaggggaaagactgttggggtctctaagaagcgttaagctattatgttttggcttggatattagattttgtttaggaggcatgtttgaagtacactacatgttttgcatcataccaactttgtatccgttgttaaatggcttgacaatttcaattttgtttgttatttgcatctgagattccgattagttaaatgatgttgg

SEQ ID NO: 27227 - DNA, 271 bp, Glycine max
  Clone ID: 701100502H1
ctttgaggaggttcggtagagtggcgtggcgttttactcacaacatcatcaacattatcaaatccacctcttccggcaacctcaatttccgctccctaaatcatgctcgcgtttcgatcgaagccttgttgcagttacaaggaaacagcgtccctcgcacttgcacacttcaggcacttcgtgttcaactacgcacgcgccgggagctctcggtgccctccacgcgccggcttcggggttcggagaggctacatcgtcgttgcctcgttgg

SEQ ID NO: 27228 - DNA, 265 bp, Glycine max
  Clone ID: 701100505H1
aaccccttcttcacgttacctacgtggtcattcaaaaccacagtacgaagaggaaaaaaacaaaaaagtcataatatatatcaacaaaagggaacgatattttcagcaaagttttgctctccacgtttattgaatcaaggtcttttctaatgctaggtgttgaatttggttaaccagtcttggaggtttatctgctattattaaaagtgttgggatacaagtaccaagcagaagtttgccaaggcagctgcttttagctgatgcc

SEQ ID NO: 27229 - DNA, 269 bp, Glycine max
  Clone ID: 701100517H1
acgtgctcgcagtcgcggtggcggtggcggtggtggacaccgtagccgtgacggtggttatggcggtggctatggtggcggtggtggtggtggttatggcggtggcacagaccgtggttagcgtctcgtggtggtgatggtcgctgatggaggctcggagaaactcgaggcttgatgtcgtcaattagggtttatgattatgccccgtatttttagttgttgtggtttgagttcgagtttcttaatggtttcgtgttaccgtggttctt

SEQ ID NO: 27230 - DNA, 214 bp, Glycine max
  Clone ID: 701100532H1
agacgagtcaaagacaatgtcagggatcattcacaagattgacgagacccttcatgtgggaggcacaagaaggaggaggagcacaagggtgagcagcaccatggtggagaatacaaaggggagcatcatggtgaacacagtactgaatacaaaggagagcatcatgttggtgagcacaacccggagcaccatggaggagaagagcacaaggagg

SEQ ID NO: 27231 - DNA, 260 bp, Glycine max
  Clone ID: 701100569H1
cagcagagagcccgtcttaacaaacgctcttctctggaaactccccgttcttttccttctttcttcttctctgtctggtcttcgatcttcgatcttcgtccctgaaaatgacagagtgcatttcaatccagatcggccaggccgccattcaggttcgaaacgcctgctgggagctttactgcctcgaacacggcattcagcctgatgggcagatgccaagtgactagaccgttggtggaggtgatgatgctttcaacacc

SEQ ID NO: 27232 - DNA, 69 bp, Glycine max
  Clone ID: 701101151H1
gggaagtcggtcagatgattcgtcttcagagtctgaagatgagaagactgatgcaagagatgtcgtacc

SEQ ID NO: 27233 - DNA, 136 bp, Glycine max
  Clone ID: 701101154H1
cgttgttgttgttctaaaacgtccacacattctccgtcgccacaacaacaatggctccgaagaaaggtgtgaaaggttccgttgtagcagcgaagaagaaggttcaggagaaggtgacgaatcctttgttcgagaa

SEQ ID NO: 27234 - DNA, 203 bp, Glycine max
  Clone ID: 701101212H1
gccccagctcgagcgattcggttcactcacgctcgagccggaataatcggttacctccccacgaaaatactaaatgcaaaccctatttgcaaccatgtgaaggctcttcaatccagatcctcacacaagggaagctaagtgccccacgtatattaagagttcacaaagttattaattatgtaatagagaagatggtgcttgac

SEQ ID NO: 27235 - DNA, 197 bp, Glycine max
  Clone ID: 701101258H1
cggcaagaccaaaccggcgcgccgctcagctcctccaccaccaccaccacccccgtggtggcgccgatcagcgtggtggaccacggcctcccctacgacacccacaacctctacgacgtctccttcaacaacacccacaccatctacaccctcctcacctccgacccctccctcgtcgactcctggatctccaccgt

SEQ ID NO: 27236 - DNA, 196 bp, Glycine max
  Clone ID: 701101260H1
acagctttgacaatttatctaaaatcaattacctattctcctttgctcgcattctcagtcactctttcggtgtttgccttcagatccgacggagggcaaccccatttagttaacattcagtttcagaagacagttagacttcaattaattgtgctgtacgtggatttcaagcttgacgagagttacacgccgagca

SEQ ID NO: 27237 - DNA, 199 bp, Glycine max
  Clone ID: 701101263H1
cttctgactctcttgactcaccaatcatgtcggacgaagagcaccctttccagtccaaggccgacgccggagcctccaaaacctaccctcagcaagccggtaccatccgccagaccggctacatcgtcatcaaaggccgcccctgccaggctgtggaagtctcgacttccaaaactggacagcacggtcacgctaagtg

SEQ ID NO: 27238 - DNA, 261 bp, Glycine max
  Clone ID: 701101331H1
cctcgagccgaatcggatcgagatttgagtttgctataatcacacgctcaaccacttagtcaaaagccttatctgagtttacctctgtgtctctcggcgcatcaaccctatctgtctgccgttgcatcagtaaagtcatcttagatggttgaacaagacttcctcagcgagcacatgaacgcctcactctcaagactgacattttgtatgagctaagctgttatacggagaacgatctcacgagttacatcgacagagtcg

SEQ ID NO: 27239 - DNA, 236 bp, Glycine max
  Clone ID: 701101417H1
gcagaagtgaagctgttgagcttttttgcgagtccctttggcaaaagggttgaatgggcattgaaactgaagggtgtggagtatgagtacatagaacaagatatcttcaacaagactagtctccttctccagttgaacccggttcacaagaaggttccggttcttgttcatgcccacaaacccatcgctgagtcattcgtcatcgttgaatacgttgatgaaacatggaagcagta

SEQ ID NO: 27240 - DNA, 234 bp, Glycine max
  Clone ID: 701101418H1
gtttcttcctcgcttttctgcaaaatcatctaaatccgtttctgatcctgaatcatcagtttttcccctgacagatgggaggtggcaaggacaaacacaatgaagaagagaaaggagttttctcacatctggctcatggagtagctcaagctgctcatggttaccctccaggggcataccctccacctcctggggcataccctccttaccaagggtacccacctgctcatggct

SEQ ID NO: 27241 - DNA, 268 bp, Glycine max
  Clone ID: 701101564H1
atgctctgtagctggtcctgggtttgtgaatattgtcttgtcgaagaagtggatagcgcagaggttagagatgttgctgattgatggtattgataagtgggcacctcgacttcccgtgaagacagttctggttgatttttcctcacctaacatagcagtcgaaatgcatgttggacacctgagatctaccattattggggacacattagctcgcatgtttgaattttcacgtgtggaaactcttatccgcagaaatcatcttggtgac

SEQ ID NO: 27242 - DNA, 168 bp, Glycine max
  Clone ID: 701101580H1
tacgctgtcgattcggctcgattgactggattcctggggagagttgagtctgacacagagctacccctcttgcaagtcatacaataataatcgcgaagctacgtatgaaacatagatcacaattcacacacatgcggtgacggtagtagtggtagtgcagcagagaag

SEQ ID NO: 27243 - DNA, 273 bp, Glycine max
  Clone ID: 701101629H1
tcgagcaccttttggggagaccaccggagatatgtacggacggagtgattcttacgaatccgatttggcgcttctggattcgattcgccgccacttgctgggagagtccgaattgatattcggagccccgaatttcggttcgggtcggagctccagtttcagcagcttggactcgtgtttgagtgatgattggggagagcttccgtttaaggaggacgattcagaagatatggtgttgtacggcgttctccgtgacgcagttaatgtggggtg

SEQ ID NO: 27244 - DNA, 258 bp, Glycine max
  Clone ID: 701101805H1
cggcatgtcaccattcttgaccagtcaccccaccagctcgccacggccaagcagacggcgccactcacggcatgcaaaatcatcgccggggctgccgcggctctcccctttcgaactgattatgccgatagatatgtatccgcaggcagtattgcgtactggccggctccacagcgtggcatcacggcggcatacagggttttgatccttggaggcaacgcgtgtctaattggtccggtctacccaacattttggttg

SEQ ID NO: 27245 - DNA, 252 bp, Glycine max
  Clone ID: 701101806H1
ccggtgtccgcctttcccgggtgcatggctcaatcgtcccttgtcatggtctcgactctcctccagctccacaactccctggaccccaccagctccctcctctccaacgccgacggcgcatcctccctcctccactcctcctccgtcgcccctctcctcttcttcaccatcgcctccgtcctctccttcgtcgcctccacgcgcccctctccttcctcggactactctgtctctgccttccgcaccctctcc

SEQ ID NO: 27246 - DNA, 215 bp, Glycine max
  Clone ID: 701101822H1
gtgatcctcttgttgacttgataccaatttatttcgctgtgtttcgcggtgattcttatctccttaagaagtttttagaacgctacaaacttccttttgctcgtaacatatcaagatatgcgtcaacagcgggtgctcaaacgttcggccgactttcatatgttgccatgtgctattgtatcttgcatgatgacaatgtcttgggagctcttttt

SEQ ID NO: 27247 - DNA, 258 bp, Glycine max
  Clone ID: 701101824H1
cgtcacaaccgaaacagtttccatctctctcacaaaatgacaacaatatcaaattgctcccttctcttcctcttcctcttcctctccaccctccacatagcttccaccctctcaacccccaccaacttcctcacgtcctcctgcagcaccacccagtacccagccctctgcatccagtccctctccgtctacgcctccaccatccagcacgacccccacgagctcgtccagacagccctctccctctccctcaaccac

SEQ ID NO: 27248 - DNA, 251 bp, Glycine max
  Clone ID: 701101825H1
ctcctttaagcacgtaatcttagataaaaccccaagattcatatatatgggggccaatatgcgcttgacagggttttagcttacttctgacaatacttcttggaaaaaaaacagttcgataaaacccttcacatgggcagcaagtcctcgatcgcgttcttcctttgcatttgaaagttgaaacatctaatcgctgaaacatggcacctatctgtctttttgtcgtatacaactaattaagaggcctatgg

SEQ ID NO: 27249 - DNA, 261 bp, Glycine max
  Clone ID: 701101833H1
cgccggcatctggcttccttaagctcctcattagtcctgctccttgccgctctaattctatcccctcaagttcttgctgactatgagacgcccccaatttacaagccacctgtttacacaccgccagtttatcagcccccagttcctcaaccaccagtgtacaaacctccagtttacaagcctccagttgcacaaccacctgtttataagcctccagtttataagccacccatttacaagcctccagtgtatacacctcca

SEQ ID NO: 27250 - DNA, 257 bp, Glycine max
  Clone ID: 701101839H1
cggtggtgttgccgttgcaaattgcaacactcagcacaacactgcaccacttttgtttctgcattgtgtttcccagcttagctacaactacaaacaagcccacgtcgctttcataaaaccacacccacctgccaccatcactttccccaaaacccaactcatcaaaacttaaactcagcgcgcgcgcgcgcgcgcgcgcgcgtaacgacatgcgtgaagacgctaaaaagcaacttcgtcggcgctctaacggcgag

SEQ ID NO: 27251 - DNA, 246 bp, Glycine max
  Clone ID: 701101843H1
cgctcgagccgaatattttctgcgcgacttttgctagacaccgttagtgggtatcctcaaaatactagattttcgattcgtttggtgaccggctttttaggtgtgattatcacgtttttctttttgttcaacaagctatggaggtttcggtgattggacgctcacaagcgaagctgggcgcgtctgacttggcttctcgggccgttggattttgtaatctgaagacacatttcagggttttgaatg

SEQ ID NO: 27252 - DNA, 250 bp, Glycine max
  Clone ID: 701101872H1
cgcacactactctttgtctctgtcttgtgtgtgtgcgagacatggcgatggcaatggcgcttcgcaggctttcatcttcaattgataagcctcttcgccctctcttcaatgcgggttccctctactacaagtcgtctttgcctgatgaagctgtttacgacaaggagcgacccggagttacatggccgaagcagttgaatgcttcacttgaggtcgttgatcctgagattgctgatcttattgagcttga

SEQ ID NO: 27253 - DNA, 243 bp, Glycine max
  Clone ID: 701101878H1
ctcgagccgatttccctgtctctgttctcttcaccattctctttcttctttgtttcaagtttcaccaacccagattcactctctctctcgtaattttctctcttattgaggctagaaaaagcgcgcaaaaaaactaaaaaatgcctgcggtcggaggtataaacaccggcgggggcacggcgtaccctggaagcctcactctatttgtgccggtaacatgtatagttgcagccatgggtggtt

SEQ ID NO: 27254 - DNA, 260 bp, Glycine max
  Clone ID: 701101963H1
ctcgagcgtgcacattcttcttcttcttcttgttctctttctctctctgaagcaagtgcagagcaattaataactcaagttttgggtcactgtgaccgtgatgatcgtaaagttattgtcttttgagtgatgggtttgtgctcttcggtccccagaaacgctaacgaagacatgaagctcaaactctcgttcggttcaaaatctgagaagcttgtgattcctccaacatccatcaagggacaacaacaacaacaacccca

SEQ ID NO: 27255 - DNA, 280 bp, Glycine max
  Clone ID: 701102117H1
cggaagacagagaccgagagagagatatcgagagaagacatatacactgccaagaagaagaacatgaaaattcagtgcgatgtgtgtgagaaagccccggcaaccgtgatttgctgcgcagatgaggcagctttgtgtgccaaatgtgacgttgaagttactgctgcaaacaagcttgcaagcaagcagcagaggcttctccttcaatctttatgtaacaagcttcccagatgtgacatatgtcaagataagccagctatcacatattgtgttgaggaca

SEQ ID NO: 27256 - DNA, 238 bp, Glycine max
  Clone ID: 701102305H1
tttcgattccagggttcctctgggaatatagtccctggactatcatgggattactatttgttgacatgtcacaagcttggagaggattataaggaagcatcttgaggatgtcttcgagaaggacagtggagtagctcctggcatacttcgactcttcttccatgactgctttcctaatggatgcgatgcgtctatattgttgaactgagacggtgacgagaagcaacaccgtgctaac

SEQ ID NO: 27257 - DNA, 186 bp, Glycine max
  Clone ID: 701102357H1
cagaatctccaataagcataaaagcctctccttcagatcatcatcaggcttttgatcagcaccttcaacagcagcagcaacaacaacaacaacaacaggagacagcaacagcaggcacatcatcacagaatcaatcagcagccaaatcacctcaagaaaagaggaaaggagctggttccacatcag

SEQ ID NO: 27258 - DNA, 276 bp, Glycine max
  Clone ID: 701102414H1
gttgaggcagagctgaaggaggcatctgtgatatctatgggaactgaaattggtgagcttgatttggcaaatattcgagaactctgtgaccaggttttgtctctctcggaatacagggcgcaactctatgattatctgaagagtagaagaacaccattgcacccaatttgactgcaatggttggggagcttgttggtgctcgcctcattgcccatggtggtagcttattaaatcttgcaaagcagcctggtagtactgtgcaaattcttggtgctg

SEQ ID NO: 27259 - DNA, 265 bp, Glycine max
  Clone ID: 701102450H1
cttcccctatggctcgtcactccttgctcttagccctcctcctcttcgccgccgtcgccaccgccgcgatggcggtggccgcgtccgacgccgacgacatcctgatccgtcaggtggtgccagatgttggcgaacccagaggaggacaacctgctgaacgccgagcaccacttcgcgagcttcaaggccaagttcgccaagacctacgccaccaaggaggagcacgatcatcgcttcggcgtcttcaactccaacctccgcagag

SEQ ID NO: 27260 - DNA, 264 bp, Glycine max
  Clone ID: 701102460H1
catcgagccgaatcggctcgaggcgaaagctacgagactcgtccaatctcgaaacccgcttcagcatgcagcaccccaacacgtccctgctcactgtaaccgcttccgtaaatctcaagctgctgtgagggagagagagacaggaagggtgaaggggaaaaccaggatccaagttttgcacgataggttctaaaggtcgtccgctagatgctcagatgggatcgactcaacgaacacttccaagagttgggaaacgcgttagat

SEQ ID NO: 27261 - DNA, 275 bp, Glycine max
  Clone ID: 701102464H1
cgctatggcttccttaagctcctcattagtgatgctccttgcagctctaattctatcccctcaagttcttgctgactatgagaagcccccaatttacaagccacctgtttacacaccgccagtttataagcccccagttgaaaaaccacagtgtacaaacctccagtttacaagcctccagttgacaaaccacctgtttataagcctccagtttataagccaccagtttacaagccaccagtgtacaagcctccagtgtatcaaccaccagttta

SEQ ID NO: 27262 - DNA, 263 bp, Glycine max
  Clone ID: 701102465H1
atttgatgagctcgatgatagtcatgatataaagattaacaaggatgaatttgcggatatttgcaatgccattgctttaaaatttcagaaggaagatgttatgtcttactttgagtatttagcattctaccattcaccagctcaaagagattaacagaatttgtgaggagtcctatgtttggatacctagtgtcctttgttctcgtaataaatctggttgctgttattattgagacaacgcttgatatagaaaacaattctgc

SEQ ID NO: 27263 - DNA, 158 bp, Glycine max
  Clone ID: 701102652H1
tctggttctgacttccaagttcagtccgtgtatgacatcagtctctgggggagtgtttggttactgtttcttgttgtagctgtgtatgtgatctgaatctattccagtccttttgtgcgtctctatctctctctcgtctggattactggcaactagat

SEQ ID NO: 27264 - DNA, 109 bp, Glycine max
  Clone ID: 701102663H1
ccttgtcacaagctggtagtctaacgttgtcttcggagcctcatctgtacataggttgttctgttatgttcggtgcgtgttgtcgttcttggcatccaccatatctggg

SEQ ID NO: 27265 - DNA, 213 bp, Glycine max
  Clone ID: 701102664H1
aggggctttcctcttgcttctggccaatctaaagccaagtttcaaatggagcccaatactggagtgacatttgatgatgttgctggagtggatgaagccaagcaggattttatggaggtggtggaatttcttaagaagcctgagaggttcactgctgttggggctcgcataccaaaaggtgttcttcttgttggtcctcctggaactgggaag

SEQ ID NO: 27266 - DNA, 206 bp, Glycine max
  Clone ID: 701102666H1
ccctcgagccgaatcggctcgagcggctcgaggtgagatttgcgaatctgagaaatggcggattcttctcgggaggagaacgtttacatggcgaaattggcggacaggccgagcgttacgaggagatggttgagttcatggagaaggttgcaaagactgtggaggttgaggagttgacggtggaggagaggaatctcctctctgtg

SEQ ID NO: 27267 - DNA, 78 bp, Glycine max
  Clone ID: 701102686H1
attgtttgtgattgacacagtatgatgggtgtcaaaggttttgttgaaggaggcatcggttacatcattgaaggatgt

SEQ ID NO: 27268 - DNA, 278 bp, Glycine max
  unsure at all n locations
  Clone ID: 701102763H1
taggtgatggcatcgaggattctattccatttccattatcataacagaaatcagcatgntctgtatcggagaaggttgatgaggtgaagacatctgttgttgtcagggttgatccaggactgatgtccataaacacagatttgccttcttccttggtgatggagcaagataaagctgatgcatcatatgatagcccactggccgctgcagaaccaaaatattgtttgactggagagaattgtgaagatgctaatgaggaaccgaatccttcagaagct

SEQ ID NO: 27269 - DNA, 291 bp, Glycine max
  Clone ID: 701102816H1
cggatcgagctccaatagtgttgttgatgatcttgtgcagcaatgtcgcacgacgaggtggttctgttggatgcatggggaagcatgtttgggatgagggcatggattgcattggaagaaaagggtgttaagtatgaacacaagatggaggatctcaacaacaagagctctttgcttatgcagatgaaccctatttacaagcaaattccagttctcatccataatggcaaaccaatttctgaatctgcaattatagtgcagtacatttatgaggtctggaatgacaacaaa

SEQ ID NO: 27270 - DNA, 293 bp, Glycine max
  Clone ID: 701102817H1
cagtattcggctcgatcgaagaaatagaaaaaaaaaatgttgcagcttctgtacgcggtgatattcggggaaatgttcgtgatcgcgagcttcctcttcaaaactccggcgaggaagctggtcatcatcacattggatcgggtcaagcgcggtcgcggccccgtcgtcgtcaagaccgtcgccgccacgctgctggtggttctcgcttcctcgctctacagcatcgccaagatccggcgtcggaacctcgacgctccgtcgttaaccccaccgacaagtactcgtgtcaagca

SEQ ID NO: 27271 - DNA, 283 bp, Glycine max
  Clone ID: 701102818H1
ggctcgagattgctttctcttttcagttctcttcttttctctcttggcgacaccactgcaacactttccttttctattctcagagcgtttttagtgtttttcaagcaagcgagtacggtaccattctattctactccctcacgtacgtgcacattctctctctctctctctctctctctctctttttctgtgttttgtggtggcttataattaggaaactactgcaaaaggaaacttttttgctgaattttcacagtcccaacagttttttaaaaggtttttc

SEQ ID NO: 27272 - DNA, 169 bp, Glycine max
  Clone ID: 701103216H1
gtcattcacaacacaaacacattcaacaacatggtagcaattctcaagagacagggagaaaacgaatccgaagaaaccatcataggcttggcaaaaagtctcatgcaactctcgcgtgtccaacaacaaagcaataagcctcttctcaaaaccttttctccaacggagt

SEQ ID NO: 27273 - DNA, 196 bp, Glycine max
  Clone ID: 701103364H1
ctcgagccgttcagcgagcagtacttcttattcctctgaagataacgaaagtagtactgtcactggtcttgattcccctgtcactaaggtttgggatggaaaaagtaatagaaaccaggctgtttcttatgttcatcacccacttgaaaattttgacaatcacagtgcaaagaaaaggaataagagccattctcgg

SEQ ID NO: 27274 - DNA, 247 bp, Glycine max
  Clone ID: 701103517H1
tcctggttcttggaaaatttggaatattggcacaatattcacgatacttgtatcctttacgaggggcaaatggggacccttgctacaattgaaagagaaagttgaaacaacaatagacgaagcacaacgagtagtagacattatagaggacgtggctgagggggtagataaggtcgcggtgtcagctgtgaagcatcttcccgatggaaaatttcgtgatgctgttgaatttgttgaaaaagtagct

SEQ ID NO: 27275 - DNA, 270 bp, Glycine max
  Clone ID: 701103616H1
cccaaccctatccctcttctcagattcattccatcatggctctctccaaagccaccttcttgacgcacctcagaaccctctccaattctcaccgccgcccttcctcgtgcgtttcaatccgcctcctctccttctcctccccggggaggccgcggcggacgccgccgaagaaagcgccactccgcatggaaccgcccctctccgccctgaaccgcacccaaaccgctccaaagcccctacaatcaccctattatctaaaccctaacaacc

SEQ ID NO: 27276 - DNA, 264 bp, Glycine max
  Clone ID: 701103618H1
cccaaatcaaccaccctcttccgtcgccagccagctccaatgtccccgacggctccgaggttctcaacactccggcgtctcccaattcttcgtctatttcatcatcgtccaacgaagcagcagccgccaccaccgccaacaaacaacgggaaatgataatgaagaggaggaagatgaaacagcaatagatgcaacagcaggcagagaagaagaagatcatcaagaccaagacaagactaagaaacagctcaagccataaaagaa

SEQ ID NO: 27277 - DNA, 261 bp, Glycine max
  Clone ID: 701103641H1
ctcttctaacatggcgactcacatcctctctcgcatcttccccaaaaccctagcccccttcctctcccgttctctctccaccgccccctctcctccctccctctccgcgctctccttcctccgctgcatctccgttgctccaacccctccctccaccgcgccctcctccccaactctccctccctccgcgccctctccacacgcgccactacctcctccctcaacgaccccacccctaactggtccaaccgtcccccgaaa

SEQ ID NO: 27278 - DNA, 1358 bp, Glycine max
  Clone ID: 701100307CPR9855
gaattcggctcgagtttgaaccaatgacaatgcttcagaaaatggctgagcttatggagtactcttacctgttagatatggcggacaagactgaggatccatacatgagactagtatatgcttcatcattctttatatctgtctactatgcctatcaacgaacgtggaagccattcaatccaattcttggtgagacttatgaaatggttaaccatggtggcattacatttatatcagagcaggtcagtcatcaccctccaatgagtgctgggcatgctgaaactgaacatttcacttatgatgttacatcaaaattgaaaaccaaatttctcggcaactcagttgatgtatatcctgttggaagaacgcgtgttaccctcaaaagagatggtgtggtccttgatttggtgcctcctcctacaaaagttagcaacttgatttttggacgaacttggattgattcaccaggagagatgatcctgacaaatctgactacaggggacaaagtggtgctgtattttcaaccatgtggctggtttggatatgaagtggatgggtacgtgtataattctgctgacgagcctaagatactgatgactggaaaatggaatgaggctatgaattatcaagtttgtgactcagagggagaaccacttccaggcactgagttgaaagagatttggagagttgctgataccccgaagaaggacaagttccagtacacgcattttgcacacaagattaacagctttgacactgctcccaagaagttgttggcatctgactctcgtctacgtcctgatagaatggcccttgagaagggtgacctatccacatctggttatgagaagagcagtttggaggagaggcaaagagctgagaagagaaaccgagaggccaagggccataagttcactcctagatggtttgatttaacagatgaagtaactcctaccccttggggtgacttggaagtttaccaatacaacggtaaatatacccaacattgtgctgccgttgatagttctgagtgcattgaagtgcctgacatcagaccagaattcaacccttggcaatatgataatttggatgctgaatagtgagcatccttgtggaattctttctattttttttaaatatcattttgttattaagtttgtaatgtaatcttgattggaatgcttgaaatttggttttgtttttgggttgttttatcactgtagtatttgattaattaatagtagctatgttagttcatcagttcactttgcatggataaatgctagtagggaaattaaagttatcttccaaaaaaaaaaaaaaaaaaaaaaaaaaaaaaaaaaaaagggcggccgccg
